(19) United States
(12) Patent Application Publication
(10) Pub. No.: US 2011/0288003 A1
(43) Pub. Date: Nov. 24, 2011

(54) AMIDE BASED GLUCAGON AND SUPERFAMILY PEPTIDE PRODRUGS

(75) Inventors: Richard D. DiMarchi, Carmel, IN (US); Binbin Kou, Bloomington, IN (US)

(73) Assignee: Indiana University Research and Technology Corporation, Indianapolis, IN (US)

(21) Appl. No.: 13/130,962

(22) PCT Filed: Dec. 18, 2009
(86) PCT No.: PCT/US09/68745

§ 371 Date: May 24, 2011

Related U.S. Application Data
(60) Provisional application No. 61/187,556, filed on Jun. 16, 2009.
(60) Provisional application No. 61/144,271, filed on Jan. 13, 2009.
(60) Provisional application No. 61/139,210, filed on Dec. 19, 2008.

(51) Int. Cl. A61K 38/26; A61P 3/10; A61P 1/00; A61P 3/00; C07K 14/605; A61P 3/08

(52) U.S. Cl. 514/1.3; 530/308

(57) ABSTRACT

Prodrug formulations of glucagon superfamily peptides are provided wherein the glucagon superfamily peptide has been modified by the linkage of a dipeptide to the glucagon superfamily through an amide bond linkage. The prodrugs disclosed herein have extended half lives and are converted to the active form at physiological conditions through a non-enzymatic reaction driven by chemical instability.

### CROSS REFERENCE TO RELATED APPLICATIONS

[0001] This application claims priority to the following: U.S. Provisional Patent Application No. 61/139,210 filed on Dec. 19, 2008, U.S. Provisional Patent Application No. 61/144,271 filed Jan. 13, 2009, and U.S. Provisional Patent Application No. 61/187,556 filed on Jun. 16, 2009. The disclosure of each application is hereby expressly incorporated by reference in its entirety.

### BACKGROUND

[0002] Peptide-based drugs are highly effective medicines with relatively short duration of action and variable therapeutic index. The present disclosure is directed to peptide-based prodrugs wherein the prodrug derivative is designed to delay onset of action and extend the half life of the drug. The delayed onset of action is advantageous in that it allows systemic distribution of the prodrug prior to its activation. Accordingly, the administration of prodrugs eliminates complications caused by peak activities upon administration and increases the therapeutic index of the parent drug.

[0003] Receptor recognition and subsequent processing of peptide and protein agonists is the primary route of degradation of many peptide and protein-based drugs. Thus binding of the peptide drug to its receptor will result in biological stimulation, but will also initiate the subsequent deactivation of the peptide/protein induced pharmacology through the enzymatic degradation of the peptide or protein. In accordance with the present disclosure, prodrugs can be prepared to extend the peptide or protein's biological half life based on a strategy of inhibiting recognition of the prodrug by the corresponding receptor.

[0004] The prodrugs disclosed herein will ultimately be chemically converted to structures that can be recognized by the receptor, wherein the speed of this chemical conversion will determine the time of onset and duration of in vivo biological action. The molecular design disclosed in this application relies upon an intramolecular chemical reaction that is not dependent upon additional chemical additives, or enzymes.

[0005] Pre-proglucagon is a 158 amino acid precursor polypeptide that is processed in different tissues to form a number of different proglucagon-derived peptides, including glucagon (SEQ ID NO: 701), glucagon-like peptide-1 (GLP-1; amino acids 7-36 are provided as SEQ ID NO: 703 and SEQ ID NO: 704), glucagon-like peptide-2 (GLP-2; SEQ ID NO: 708) and oxyntomodulin (OXM; SEQ ID NO: 706), that are involved in a wide variety of physiological functions, including glucose homeostasis, insulin secretion, gastric emptying, and intestinal growth, as well as the regulation of food intake.

[0006] Glucagon is a 29-amino acid peptide (that corresponds to amino acids 33 through 61 of pre-proglucagon, while GLP-1 is produced as a 37-amino acid peptide that corresponds to amino acids 72 through 108 of pre-proglucagon. GLP-1(7-36) amide (SEQ ID NO: 704; the C terminus is an arginine amide) or GLP-1(7-37) acid (SEQ ID NO: 703; C terminus is a glycine) are biologically potent forms of GLP-1, that demonstrate essentially equivalent activity at the GLP-1 receptor.

[0007] Glucagon is a life-saving medicine that is used in the acute treatment of severe hypoglycemia. Oxyntomodulin has been reported to have pharmacological ability to suppress appetite and lower body weight. Clinical studies with GLP-1 receptor agonists or stabilized GLP-1 analogs have proven this family of peptides to be an effective treatment for Type II diabetes. In addition, it might be intrinsically safer than insulin therapy because of its glucose dependent action, thus eliminating the chances of hypoglycemia. Structure-activity relationship studies have shown that the N terminal histidine for each of these three peptides (glucagon, GLP-1 and oxyntomodulin) is especially important for the full action and that N-terminally extended forms severely diminish biological potency.

[0008] Additional peptides are known that resemble glucagon and GLP-1 in structure and have similar activities. For example, Exendin-4 is a peptide present in the saliva of the Gila monster that resembles GLP-1 in structure, and like glucagon and GLP-1, increases insulin release.

[0009] In addition, gastric inhibitory polypeptide (GIP) is also known as a glucose-dependent insulinotropic peptide, and is a member of the secretin family of hormones. GIP is derived from a 153-amino acid proprotein encoded by the GIP gene and circulates as a biologically active 42-amino acid peptide (SEQ ID NO: 707). The GIP gene is expressed in the small intestine as well as the salivary glands and is a weak inhibitor of gastric acid secretion. In addition to its inhibitory effects in the stomach, in the presence of glucose, GIP enhances insulin release by pancreatic beta islet cells when administered in physiological doses. GIP is believed to function as an enteric factor that stimulates the release of pancreatic insulin and that may play a physiological role in maintaining glucose homeostasis.

[0010] Osteocalcin (SEQ ID NO: 709) is a noncollagenous protein found in bone and dentin. It is secreted by osteoblasts and thought to play a role in mineralization and calcium ion homeostasis. Osteocalcin has also been reported to function as a hormone in the body, causing beta cells in the pancreas to release more insulin, and at the same time directing fat cells to release the hormone adiponectin, which increases sensitivity to insulin.

[0011] One disadvantage associated with the therapeutic use of bioactive peptides such as osteocalcin, GIP, glucagon, GLP-1 and oxyntomodulin is their extremely short half-life (approximately two minutes for glucagon and GLP-1) in plasma. Accordingly, to obtain reasonable glycemic control, native glucagon-related peptides would need to be administered continuously for a prolonged period of time. The short half life of glucagon and GLP-1 related peptides results from the rapid degradation by Dipeptidyl Peptidase IV (DPP-IV), which cleaves between the second and third amino acids. This cleavage not only inactivates the native peptides but in the case of glucagon and GLP-1 the shortened forms could be functional antagonists at their respective receptors. Accordingly, there is a need for longer-acting variants of GIP, glucagon, GLP-1, and oxyntomodulin, and related peptides, to realize the full therapeutic potential of these mechanisms of drug action

### SUMMARY

[0012] In accordance with some embodiments a prodrug derivative of a bioactive polypeptide selected from the group consisting of glucagon, exendin-4, GLP-1, GLP-2, GIP, vasoactive intestinal peptide (VIP), Pituitary adenylate cyclase-activating polypeptide 27 (PACAP-27), peptide histidine methionine (PHM), oxyntomodulin, secretin, osteocalcin, growth hormone releasing hormone, as well as analogs, derivatives and conjugates of the foregoing is provided. The prodrug derivative comprises a dipeptide prodrug element covalently linked to an active site of the bioactive polypeptide via an amide linkage. In some embodiments the dipeptide is covalently bound to the bioactive polypeptide at a position that interferes with the bioactive polypeptide's ability to interact with its corresponding receptor or cofactor. In some embodiments the dipeptide prodrug element is linked to the amino-terminus of the bioactive peptide. Subsequent removal of the dipeptide, under physiological conditions and in the absence of enzymatic activity, restores full activity to the polypeptide.

[0013] In some embodiments a prodrug is provided having the general structure of A-B-Q. In this embodiment Q is a bioactive peptide, selected from the group of glucagon superfamily peptides, including glucagon-related peptides, osteocalcin, as well as analogs, derivatives and conjugates of the foregoing; and A-B represents a dipeptide prodrug linked to the bioactive peptide through an amide bond. More particularly, in some embodiments A is an amino acid or a hydroxy acid and B is an N-alkylated amino acid linked to Q through formation of an amide bond between a carboxyl of B (in A-B) and an amine of Q. Furthermore, in some embodiments, A, B, or the amino acid of Q to which A-B is linked, is a non-coded amino acid, and chemical cleavage of A-B from Q is at least about 90% complete within about 1 to about 720 hours in PBS under physiological conditions. In another embodiment, chemical cleavage of A-B from Q is at least about 50% complete within about 1 hour or about 1 week in PBS under physiological conditions.

[0014] In some embodiments A and B are selected to inhibit enzymatic cleavage of the A-B dipeptide from Q by enzymes found in mammalian serum. In some embodiments A and/or B are selected such that the cleavage half-life of A-B from Q in PBS under physiological conditions, is not more than two fold the cleavage half-life of A-B from Q in a solution comprising a DPP-IV protease (i.e., cleavage of A-B from Q does not occur at a rate more than 2× faster in the presence of DPP-IV protease and physiological conditions relative to identical conditions in the absence of the enzyme). In some embodiments A and/or B is an amino acid in the D stereoisomer configuration. In some exemplary embodiments, A is an amino acid in the D stereoisomer configuration and B is an amino acid in the L stereoisomer configuration. In some exemplary embodiments, A is an amino acid in the L stereoisomer configuration and B is an amino acid in the D stereoisomer configuration. In some exemplary embodiments, A is an amino acid in the D stereoisomer configuration and B is an amino acid in the D stereoisomer configuration.

[0015] In some embodiments the dipeptide prodrug element (A-B) comprises a compound having the general structure of Formula I:

[chemical structure]

[0016] wherein

[0017] R₁, R₂, R₄ and R₈ are independently selected from the group consisting of H, C₁-C₁₈ alkyl, C₂-C₁₈ alkenyl, (C₁-C₁₈ alkyl)OH, (C₁-C₁₈ alkyl)SH, (C₂-C₃ alkyl)SCH₃, (C₁-C₄ alkyl)CONH₂, (C₁-C₄ alkyl)COOH, (C₁-C₄ alkyl)NH₂, (C₁-C₄ alkyl)NHC(NH₂⁺)NH₂, (C₀-C₄ alkyl)(C₃-C₆ cycloalkyl), (C₀-C₄ alkyl)(C₂-C₅ heterocyclic), (C₀-C₄ alkyl)(C₆-C₁₀ aryl)R₇, (C₁-C₄ alkyl)(C₃-C₉ heteroaryl), and C₁-C₁₂ alkyl(W₁)C₁-C₁₂ alkyl, wherein W₁ is a heteroatom selected from the group consisting of N, S and O, or R₁ and R₂ together with the atoms to which they are attached form a C₃-C₁₂ cycloalkyl or aryl; or R₄ and R₈ together with the atoms to which they are attached form a C₃-C₆ cycloalkyl;

[0018] R₃ is selected from the group consisting of C₁-C₁₈ alkyl, (C₁-C₁₈ alkyl)OH, (C₁-C₁₈ alkyl)NH₂, (C₁-C₁₈ alkyl)SH, (C₀-C₄ alkyl)(C₃-C₆)cycloalkyl, (C₀-C₄ alkyl)(C₂-C₅ heterocyclic), (C₀-C₄ alkyl)(C₆-C₁₀ aryl)R₇, and (C₁-C₄ alkyl)(C₃-C₉ heteroaryl) or R₄ and R₃ together with the atoms to which they are attached form a 4, 5 or 6 member heterocyclic ring;

[0019] R₅ is NHR₆ or OH;

[0020] R₆ is H, C₁-C₈ alkyl or R₆ and R₂ together with the atoms to which they are attached form a 4, 5 or 6 member heterocyclic ring; and

[0021] R₇ is selected from the group consisting of H and OH.

[0022] In another embodiment the dipeptide prodrug element (A-B) comprises a compound having the general structure of Formula I:

[chemical structure]

[0023] wherein

[0024] R₁, R₂, R₄ and R₈ are independently selected from the group consisting of H, C₁-C₁₈ alkyl, C₂-C₁₈ alkenyl, (C₁-C₁₈ alkyl)OH, (C₁-C₁₈ alkyl)SH, (C₂-C₃ alkyl)SCH₃, (C₁-C₄ alkyl)CONH₂, (C₁-C₄ alkyl)COOH, (C₁-C₄ alkyl)NH₂, (C₁-C₄ alkyl)NHC(NH₂⁺)NH₂, (C₀-C₄ alkyl)(C₃-C₆ cycloalkyl), (C₀-C₄ alkyl)(C₂-C₅ heterocyclic), (C₀-C₄ alkyl)(C₆-C₁₀ aryl)R₇, (C₁-C₄ alkyl)(C₃-C₉ heteroaryl), and C₁-C₁₂ alkyl(W₁)C₁-C₁₂ alkyl, wherein W₁ is a heteroatom selected from the group consisting of N, S and O, or R₁ and R₂ together with the atoms to which they are attached form a C₃-C₁₂ cycloalkyl; or R₄ and R₈ together with the atoms to which they are attached form a C₃-C₆ cycloalkyl;

[0025] R₃ is selected from the group consisting of C₁-C₁₈ alkyl, (C₁-C₁₈ alkyl)OH, (C₁-C₁₈ alkyl)NH₂, (C₁-C₁₈ alkyl)SH, (C₀-C₄ alkyl)(C₃-C₆)cycloalkyl, (C₀-C₄ alkyl)(C₂-C₅ heterocyclic), (C₀-C₄ alkyl)(C₆-C₁₀ aryl)R₇, and (C₁-C₄ alkyl)(C₃-C₉ heteroaryl) or R₄ and R₃ together with the atoms to which they are attached form a 4, 5 or 6 member heterocyclic ring;

[0026] R₅ is NHR₆ or OH;

[0027] R₆ is H, C₁-C₈ alkyl or R₆ and R₁ together with the atoms to which they are attached form a 4, 5 or 6 member heterocyclic ring; and

[0028] R₇ is selected from the group consisting of hydrogen, C₁-C₁₈ alkyl, C₂-C₁₈ alkenyl, (C₀-C₄ alkyl)CONH₂, (C₀-C₄ alkyl)COOH, (C₀-C₄ alkyl)NH₂, (C₀-C₄ alkyl)OH, and halo.

[0029] As described above, in some aspects there is provided a prodrug having the general structure of A-B-Q, wherein Q is a glucagon superfamily peptide (e.g. a glucagon related peptide, Growth Hormone Releasing Hormone (GHRH; SEQ ID NO: 719), vasoactive intestinal peptide (VIP; SEQ ID NO: 720), Pituitary adenylate cyclase-activating polypeptide 27 (PACAP-27; SEQ ID NO: 721), peptide histidine methionine (PHM; SEQ ID NO: 722), or Secretin (SEQ ID NO: 723), and/or and analogs, derivatives and conjugates thereof). Glucagon superfamily peptides may have common structural characteristics, including but not limited to homology within the N-terminal amino acids and/or alpha-helical structure within the C-terminal portion. It is believed that the C-terminus generally functions in receptor binding and the N-terminus generally functions in receptor signaling. A few amino acids in the N-terminal portion and C-terminal portion are highly conserved among members of the glucagon superfamily, for example, His1, Gly4, Phe6, Phe22, Val23, Trp25, and Leu26, with amino acids at these positions showing identity, conservative substitutions or similarity in amino acid side chains. In some embodiments Q is a glucagon related peptide, e.g. glucagon (SEQ ID NO: 701), oxyntomodulin (SEQ ID NO: 706), exendin-4 (SEQ ID NO: 718), Glucagon-like peptide-1 (GLP-1) (amino acids 7-37 provided as SEQ ID NOs: 703 and 707), Glucagon-like peptide-2 (GLP-2) (SEQ ID NO: 708), GIP (SEQ ID NO: 707) or analogs, derivatives and conjugates of the foregoing. In some embodiments Q as a glucagon related peptide comprises an amino acid sequence that is at least about 40%, 45%, 50%, 55%, 60%, 65%, 70%, 75%, 80%, 85%, 90%, or 95% identical to the corresponding sequence of native glucagon, native oxyntomodulin, native exendin-4, native (7-37)GLP-1, native GLP-2, or native GIP over the length of the native peptide (or over the positions which correspond to glucagon, see e.g., FIG. 10). In other embodiments, a glucagon superfamily peptide (Q) comprises an amino acid sequence of native glucagon, native exendin-4, native (7-37)GLP-1, native GLP-2, native GHRH, native VIP, native PACAP-27, native PHM, native Oxyntomodulin, native Secretin, or native GIP with up to 1, 2, 3, 4, 5, 6, 7, 8, 9 or 10 amino acid modifications. In still further embodiments, Q comprises an amino acid sequence which is a chimera of two or more native glucagon related peptide sequences. In some embodiments, Q comprises an amino acid sequence at least about 50% identical to native glucagon (SEQ ID NO: 701) that retains the alpha-helix conformation of the amino acids corresponding to amino acids 12-29 of SEQ ID NO: 701.

[0030] Q may be any of the glucagon superfamily peptides that are known in the art, including for example, any glucagon related peptides as known in the art, some of which are disclosed herein by way of nonlimiting examples. A variety of GLP-1 analogs are known in the art and are a glucagon-related peptide according to the current invention, see, e.g., WO 2008023050, WO 2007030519, WO 2005058954, WO 2003011892, WO 2007046834, WO 2006134340, WO 2006124529, WO 2004022004, WO 2003018516, WO 2007124461 each incorporated herein by reference in its entirety for each of its sequence or formula disclosures of GLP-1 analogs or derivatives. In certain embodiments, Q is a Class 1, 2, 3, 4 or 5 glucagon related peptide as detailed herein. In any of the embodiments described herein, Q is any of SEQ ID NOs: 1-684, 701-742, 801-919, 1001-1262, 1301-1371, 1401-1518, 1701-1776, and 1801-1921.

[0031] While the dipeptide prodrug, e.g. A-B, may be linked to Q at any position that interferes with the activity of Q, embodiments disclosed herein illustrate examples of positions that are suitable for linkage of A-B. When position numbers are named herein by referring to the position in the native glucagon sequence (SEQ ID NO: 701), the corresponding position in glucagon analogs or in other glucagon superfamily peptides can be determined by alignment. See, e.g., FIG. 10 which shows an alignment of certain glucagon superfamily peptides. For example, position 24 based on native glucagon corresponds to position 24 of (7-37) GLP-1.

[0032] In certain embodiments a glucagon superfamily peptide may comprise a C-terminus or a C-terminal amino acid sequence including but not limited to: COOH, CONH₂, GPSSGAPPPS (SEQ ID NO: 710), GPSSGAPPPS-CONH₂ (SEQ ID NO: 711), a oxyntomodulin carboxy terminal extension, KRNRNNIA (SEQ ID NO: 714) or KGKKNDWKHNITQ (SEQ ID NO: 713). Additional, C-terminal amino acid sequences for glucagon superfamily peptides are further detailed below.

[0033] In other aspects, Q comprises osteocalcin (SEQ ID NO: 709), or an amino acid sequence that is at least about 40%, 45%, 50%, 55%, 60%, 65%, 70%, 75%, 80%, 85%, 90%, or 95% identical to native osteocalcin over the length of the native peptide. Q may comprise an analog of osteocalcin with up to 1, 2, 3, 4, 5, 6, 7, 8, 9 or 10 amino acid modifications relative to native osteocalcin. In yet other aspects, Q comprises growth hormone releasing hormone (GHRH) (SEQ ID NO: 719), or an amino acid sequence that is at least about 40%, 45%, 50%, 55%, 60%, 65%, 70%, 75%, 80%, 85%, 90%, or 95% identical to native GHRH over the length of the native peptide. Q may comprise an analog of GHRH with up to 1, 2, 3, 4, 5, 6, 7, 8, 9 or 10 amino acid modifications relative to native GHRH. In some embodiments, Q may be any analog of osteocalcin or GHRH known in the art.

[0034] In a further embodiments, there is provided a prodrug having the general structure of A-B-Q, wherein Q is a glucagon superfamily peptide, osteocalcin or an analog, derivative or conjugate thereof and A-B comprises the general structure:

[chemical structure]

[0035] wherein R₁ and R₈ are independently selected from the group consisting of H and C₁-C₈ alkyl;

[0036] R₂ and R₄ are independently selected from the group consisting of H, C₁-C₈ alkyl, C₂-C₈ alkenyl, (C₁-C₄ alkyl)OH, (C₁-C₄ alkyl)SH, (C₂-C₃ alkyl)SCH₃, (C₁-C₄ alkyl)CONH₂, (C₁-C₄ alkyl)COOH, (C₁-C₄ alkyl)NH₂, (C₁-C₄ alkyl)NHC(NH₂⁺)NH₂, (C₀-C₄ alkyl)(C₃-C₆ cycloalkyl), (C₀-C₄ alkyl)(C₆-C₁₀ aryl)R₇, CH₂(C₅-C₉ heteroaryl), or R₁ and R₂ together with the atoms to which they are attached form a C₃-C₆ cycloalkyl;

[0037] R₃ is selected from the group consisting of C₁-C₈ alkyl, (C₁-C₄ alkyl)OH, (C₁-C₄ alkyl)NH₂, (C₁-C₄ alkyl)SH, (C₃-C₆)cycloalkyl or R₄ and R₃ together with the atoms to which they are attached form a 5 or 6 member heterocyclic ring;

[0038] R₅ is NHR₆ or OH;

[0039] R₆ is H, or R₆ and R₂ together with the atoms to which they are attached form a 5 or 6 member heterocyclic ring; and

[0040] R₇ is selected from the group consisting of H and OH.
[0041] Provided that when R₄ and R₃ together with the atoms to which they are attached form a 5 or 6 member heterocyclic ring, both R₁ and R₂ are other than H.

[0042] In other embodiments, there is provided a prodrug having the general structure of A-B-Q, wherein Q is a glucagon superfamily peptide, osteocalcin or an analog, derivative or conjugate thereof and A-B comprises the general structure:

[chemical structure]

[0043] wherein

[0044] R₁ and R₈ are independently H or C₁-C₈ alkyl;

[0045] R₂ and R₄ are independently selected from the group consisting of H, C₁-C₈ alkyl, C₂-C₈ alkenyl, (C₁-C₄ alkyl)OH, (C₁-C₄ alkyl)SH, (C₂-C₃ alkyl)SCH₃, (C₁-C₄ alkyl)CONH₂, (C₁-C₄ alkyl)COOH, (C₁-C₄ alkyl)NH₂, (C₁-C₄ alkyl)NHC(NH₂+)NH₂, (C₀-C₄ alkyl)(C₃-C₆ cycloalkyl), (C₀-C₄ alkyl)(C₂-C₅ heterocyclic), (C₀-C₄ alkyl)(C₆-C₁₀ aryl)R₇, and CH₂(C₃-C₉ heteroaryl), or R₁ and R₂ together with the atoms to which they are attached form a C₃-C₁₂ cycloalkyl;

[0046] R₃ is selected from the group consisting of C₁-C₈ alkyl, (C₁-C₄ alkyl)OH, (C₁-C₄ alkyl)NH₂, (C₁-C₄ alkyl)SH, (C₃-C₆)cycloalkyl or R₄ and R₃ together with the atoms to which they are attached form a 5 or 6 member heterocyclic ring;

[0047] R₅ is NHR₆ or OH;

[0048] R₆ is H, C₁-C₈ alkyl, or R₆ and R₂ together with the atoms to which they are attached form a 5 or 6 member heterocyclic ring; and

[0049] R₇ is selected from the group consisting of hydrogen, C₁-C₁₈ alkyl, C₂-C₁₈ alkenyl, (C₀-C₄ alkyl)CONH₂, (C₀-C₄ alkyl)COOH, (C₀-C₄ alkyl)NH₂, (C₀-C₄ alkyl)OH, halo, provided that when R₄ and R₃ together with the atoms to which they are attached form a 5 or 6 member heterocyclic ring, both R₁ and R₂ are not H.

[0050] In some embodiments Q is a peptide selected from the group consisting of Growth Hormone Releasing Hormone (GHRH; SEQ ID NO: 719), vasoactive intestinal peptide (VIP; SEQ ID NO: 720), Pituitary adenylate cyclase-activating polypeptide 27 (PACAP-27; SEQ ID NO: 721), peptide histidine methionine (PHM; SEQ ID NO: 722), or Secretin (SEQ ID NO: 723), glucagon (SEQ ID NO: 701), exendin-4 (SEQ ID NO: 718), Glucagon-like peptide-1 (GLP-1) (amino acids 7-37 provided as SEQ ID NOs: 703 and 704), Glucagon-like peptide-2 (GLP-2) (SEQ ID NO: 708), GIP (SEQ ID NO: 707), or analogs, derivatives and conjugates of the foregoing. In some embodiments, Q is a glucagon related peptide.

[0051] In another embodiment a prodrug analog of a glucagon superfamily peptide, or osteocalcin, or an analog, derivative or conjugate thereof, is provided wherein the prodrug moiety (A-B) is covalently linked to Q at one or more internal amino acid residues in the sequence of Q, e.g., at a position of Q corresponding to position 12, 16, 17, 18, 20, 28, or 29 of native glucagon (SEQ ID NO: 701). For example, in certain embodiments the prodrug moiety (A-B) is linked, directly or via a linker, to a substituted Lys at position 20 of Q. In such embodiments, Q may comprise at position 20 (relative to the native glucagon sequence), a substitution comprising the structure:

[chemical structure]

[0052] In other embodiments, the prodrug moiety (A-B) is linked, directly or via a linker, to a substituted amino-Phe at position 22. In such embodiments, Q may comprise at position 22 (relative to the native glucagon sequence), a substitution comprising the structure:

[chemical structure]

[0053] Alternatively or additionally, the prodrug moiety (A-B) is linked, directly or via a linker, to the amino terminus of Q, wherein A-B comprises the structure:

[chemical structure]

[0054] wherein R₁ and R₈ are independently selected from the group consisting of H and C₁-C₈ alkyl;

[0055] R₂ and R₄ are independently selected from the group consisting of H, C₁-C₈ alkyl, C₂-C₈ alkenyl, (C₁-C₄ alkyl)OH, (C₁-C₄ alkyl)SH, (C₂-C₃ alkyl)SCH₃, (C₁-C₄ alkyl)CONH₂, (C₁-C₄ alkyl)COOH, (C₁-C₄ alkyl)NH₂, (C₁-C₄ alkyl)NHC(NH₂⁺)NH₂, (C₀-C₄ alkyl)(C₃-C₆ cycloalkyl), (C₀-C₄ alkyl)(C₆-C₁₀ aryl)R₇, CH₂(C₅-C₉ heteroaryl), or R₁ and R₂ together with the atoms to which they are attached form a C₃-C₆ cycloalkyl;

[0056] R₃ is selected from the group consisting of C₁-C₈ alkyl, (C₁-C₄ alkyl)OH, (C₁-C₄ alkyl)NH₂, (C₁-C₄ alkyl)SH, (C₃-C₆)cycloalkyl or R₄ and R₃ together with the atoms to which they are attached form a 5 or 6 member heterocyclic ring;

[0057] R₅ is NHR₆ or OH;

[0058] R₆ is H, or R₆ and R₂ together with the atoms to which they are attached form a 5 or 6 member heterocyclic ring; and

[0059] R₇ is selected from the group consisting of H and OH,

with the proviso that R₁ and R₂ are each other than H when R₄ and R₃ together with the atoms to which they are attached form a 5 or 6 member heterocyclic ring.

[0060] In other embodiments, the prodrug moiety (A-B) is linked, directly or via a linker, to the amino terminus of Q, wherein A-B comprises the structure:

[chemical structure]

[0061] wherein

[0062] R₁ and R₈ are independently H or C₁-C₈ alkyl;

[0063] R₂ and R₄ are independently selected from the group consisting of H, C₁-C₈ alkyl, C₂-C₈ alkenyl, (C₁-C₄ alkyl)OH, (C₁-C₄ alkyl)SH, (C₂-C₃ alkyl)SCH₃, (C₁-C₄ alkyl)CONH₂, (C₁-C₄ alkyl)COOH, (C₁-C₄ alkyl)NH₂, (C₁-C₄ alkyl)NHC(NH₂+)NH₂, (C₀-C₄ alkyl)(C₃-C₆ cycloalkyl), (C₀-C₄ alkyl)(C₂-C₅ heterocyclic), (C₀-C₄ alkyl)(C₆-C₁₀ aryl)R₇, and CH₂(C₃-C₉ heteroaryl), or R₁ and R₂ together with the atoms to which they are attached form a C₃-C₁₂ cycloalkyl;

[0064] R₃ is selected from the group consisting of C₁-C₈ alkyl, (C₁-C₄ alkyl)OH, (C₁-C₄ alkyl)NH₂, (C₁-C₄ alkyl)SH, (C₃-C₆)cycloalkyl or R₄ and R₃ together with the atoms to which they are attached form a 5 or 6 member heterocyclic ring;

[0065] R₅ is NHR₆ or OH;

[0066] R₆ is H, C₁-C₈ alkyl, or R₆ and R₂ together with the atoms to which they are attached form a 5 or 6 member heterocyclic ring; and

[0067] R₇ is selected from the group consisting of hydrogen, C₁-C₁₈ alkyl, C₂-C₁₈ alkenyl, (C₀-C₄ alkyl)CONH₂, (C₀-C₄ alkyl)COOH, (C₀-C₄ alkyl)NH₂, (C₀-C₄ alkyl)OH, halo, with the proviso that R₁ and R₂ are both not H when R₄ and R₃ together with the atoms to which they are attached form a 5 or 6 member heterocyclic ring.

[0068] In some embodiments, only one prodrug moiety is linked to Q. For example, in such embodiments, when the prodrug moiety (A-B) is linked to Q at the N-terminus, there are no prodrug moieties (A-B) linked to an internal amino acid residue in the sequence of Q, and vice versa. In some embodiments, two or three prodrug moieties are linked to Q, e.g. at the N-terminus and at one or more internal sites.

### BRIEF DESCRIPTION OF THE DRAWINGS

[0069] FIG. 1 is a graph showing the change in body weight in diet-induced obesity (DIO) mice injected intraperitoneally with a single weekly dose of 15 or 70 nmol/kg of a glucagon analog. Mice were weighed daily (N=8) after the initial injection with the following: vehicle only ▾, Glucagon Superfamily Peptide A (“Peptide A”) at 15 nmol/kg ( [symbol] ) or 70 nmol/kg ( [symbol] ), or a prodrug derivative of Peptide A wherein a dipeptide is linked to the N-terminus of Peptide A via an amide bond wherein the dipeptide is Aib⁻¹ Pro⁰ (administered at 15 nmol/kg (◯) or 70 nmol/kg ()), Aib⁻¹ dPro⁰ (administered at 70 nmol/kg (⋄)), Lys⁻¹ Sar⁰ (administered at 70 nmol/kg (♦)), dAla⁻¹ Pro⁰ (administered at 70 nmol/kg ( [symbol] )) or Ac-Aib⁻¹ Pro⁻¹ (administered at 70 nmol/kg (▪)).

[0070] FIG. 2 is a graph showing the change in body weight in diet-induced obesity (DIO) mice injected intraperitoneally with a single weekly dose of 0.5, 3, 15 or 70 nmol/kg of either vehicle only (♦), Peptide A, (at 0.5▴, 3 [symbol] , 15▾ or 70 [symbol] nmol/kg/day) or Lys⁻¹ Sar⁰-Peptide A (at 0.5Δ, 3 [symbol] , 15∇ or 70 [symbol] nmol/kg/day).

[0071] FIG. 3 is a graph of blood glucose levels (mg/dL) in DIO mice (N=8) injected first with a glucagon related peptide and then a glucose solution. Mice were injected intraperitoneally at the −60 min time point with vehicle only (▴), or a 15 or 70 nmol/kg dose of one of the following:

[0072] (A) Peptide A, (at 15 [symbol] or 70 [symbol] nmol/kg/day),

[0073] (B) Lys⁻¹ Sar₀ Peptide A, (at 15 [symbol] or 70 [symbol] nmol/kg/day), or

[0074] (C) dLys⁻¹ Sar⁰ Peptide A, (at 15□, or 70▪nmol/kg/day).

[0075] A saline solution comprising 25% (v/v) glucose was injected at a dose of 1.5 g/kg of body weight at the 0 min time point. Blood glucose levels were measured at the −60, 0, 15, 30, 60, and 120 min time points.

[0076] FIG. 4 is a graph of blood glucose levels (mg/dL) in DIO mice (N=8) injected first with a glucagon related peptide and then a glucose solution. Mice were injected intraperitoneally at the −15 min time point with either vehicle only (▾) or a 2 nmol/kg dose of one of the following compounds:

[0077] (A) Lys⁻¹ Sar⁰ Peptide A (▪),

[0078] (B) Lys⁻¹(X), Sar⁰ Peptide A (A), (X representing a 1 K PEG chain linked to the Lys side chain)

[0079] (C) Lys⁻¹(Y), Sar⁰ Peptide A (♦), (Y representing a tert-butyl glycine linked to the Lys side chain)

[0080] (D) dLys⁻¹ Sar⁰ Peptide A, ( [symbol] ).

[0081] A saline solution comprising 25% (v/v) glucose was injected at a dose of 1.5 g/kg of body weight at the 0 min time point. Blood glucose levels were measured at the −15, 0, 15, 30, 60, and 120 min time points.

[0082] FIG. 5 is a graph of blood glucose levels (mg/dL) in DIO mice (N=8) injected first with a glucagon related peptide and then a glucose solution. Mice were injected intraperitoneally at the −15 min time point with either vehicle (V), a 20 nmol/kg dose for dLys⁻¹ Sar⁰ Peptide A ( [symbol] ), or a 0.67 nmol/kg dose of one of the following compounds:

[0083] (A) Lys⁻¹ Sar⁰ Peptide A (▪),

[0084] (B) Lys⁻¹(X), Sar⁰ Peptide A (▴), (X representing a 1 K PEG chain linked to the Lys side chain)

[0085] (C) Lys⁻¹(Y), Sar⁰ Peptide A (♦), (Y representing a tert-butyl glycine linked to the Lys side chain).

[0086] A saline solution comprising 25% (v/v) glucose was injected at a dose of 1.5 g/kg of body weight at the 0 min time point. Blood glucose levels were measured at the −15, 0, 15, 30, 60, and 120 min time points.

[0087] FIG. 6 is a graph of blood glucose levels (mg/dL) in DIO mice (N=8) injected first with a glucagon related peptide and then a glucose solution. Mice were injected intraperitoneally at the −60 min time point with either vehicle only (▾) or 15 or 70 nmol/kg dose of one of the following compounds:

[0088] (A) Peptide A, (at 15Δ or 70▴nmol/kg/day),

[0089] (B) dLys⁻¹ Sar⁰ Peptide A, (at 15□, or 70▪nmol/kg/day), or

[0090] (C) Lys⁻¹ Sar⁰ Peptide A, (at 15 [symbol] or 70 [symbol] nmol/kg/day).

[0091] A saline solution comprising 25% (v/v) glucose was injected at a dose of 1.5 g/kg of body weight at the 0 min time point and 24 hours later (see FIG. 7). Indicated blood glucose levels were measured at the −60, 0, 15, 30, 60, and 120 min time points relative to the first administration of the glucose solution (i.e., the 0 min time point).

[0092] FIG. 7 is a graph of blood glucose levels (mg/dL) in DIO mice (N=8) injected intraperitoneally at the −60 min time point with either vehicle only (▾) or 15 or 70 nmol/kg dose of one of the following compounds:

[0093] (A) Peptide A, (at 15Δ or 70▴nmol/kg/day),

[0094] (B) dLys⁻¹ Sar⁰ Peptide A, (at 15⋄ or 70∇nmol/kg/day), or

[0095] (C) Lys⁻¹ Sar⁰ Peptide A, (at 15♦, or 70▪nmol/kg/day).

[0096] A saline solution comprising 25% (v/v) glucose was injected at a dose of 1.5 g/kg of body weight at the 0 min time point and 24 hours later. Indicated blood glucose levels were measured at the 0, 15, 30, 60, and 120 min time points relative to the 24 hour administration of the second glucose solution.

[0097] FIG. 8 present data indicating the weight loss in DIO mice (N=8) injected intraperitoneally with the indicated compounds at either a 15 or 70 nmol/kg dose. The indicated body weights were determined 7 days after administration of the compounds.

[0098] FIG. 9A-B present graphs of blood glucose (BG) levels (mg/dL) in DIO mice (n=8). Mice were injected intraperitoneally with vehicle only, or with prodrug peptide at 24, 8, 4, or 1 hour prior to challenge (as indicated in the figure) with an injection of 25% glucose in saline at 1.5 g/kg of body weight. Indicated blood glucose levels were measured at the 0, 15, 30, 60, and 120 min time points relative the challenge with glucose solution. FIG. 9A shows blood glucose levels following administration of Lys⁻¹ Sar⁰ Peptide A (i.e., comprising a Lys⁻¹-Sar⁰ prodrug element). FIG. 9B shows blood glucose levels following administration of dLys⁻¹ Sar⁰ Peptide A (i.e., comprising a D-Lys⁻¹-Sar⁰ prodrug element).

[0099] FIG. 10 presents an alignment of the amino acid sequences of various glucagon superfamily peptides or relevant fragments thereof. The amino acid sequence presented are GHRH (SEQ ID NO: 719), PHI (SEQ ID NO: 722), VIP (SEQ ID NO: 720), PACAP-27 (SEQ ID NO: 721), Exendin-4 (SEQ ID NO: 718), GLP-1 (SEQ ID NO: 703), Glucagon (SEQ ID NO: 701), Oxyntomodulin (SEQ ID NO: 706), GIP (SEQ ID NO: 707), GLP-2 (SEQ ID NO: 708) and Secretin (SEQ ID NO: 724).

[0100] FIG. 11 presents a graph of blood glucose levels (mg/dL) in DIO mice (nine groups of eight mice) that were subcutaneously injected with a single dose of vehicle only or 10 nmol/kg of one of the following:

[0101] (A) Glucagon Superfamily Peptide C (“Peptide C”),

[0102] (B) dK-Sar-Peptide C,

[0103] (C) dK-Gly(N-Hexyl)-Glucagon Superfamily Peptide B (“Peptide B”), or

[0104] (D) dK-F(N-Me)-Peptide C.

The mice were 5.5 months old and had been on a high fat diet for approximately 2 months. Blood glucose levels were taken at 0, 2, 4, 24, and 72 hours post injection.

[0105] FIG. 12 presents a graph of the change in body weight in DIO mice (nine groups of eight mice) that were subcutaneously injected with a single dose of vehicle only or 10 nmol/kg of one of the following:

[0106] (A) Peptide C,

[0107] (B) dK-Sar-Peptide C,

[0108] (C) dK-Gly(N-Hexyl)-Peptide B, or

[0109] (D) dK-F(N-Me)-Peptide C.

The mice were 5.5 months old and had been on a high fat diet for approximately 2 months. Food intake and fat mass were monitored during the week long study.

[0110] FIGS. 13A and 13B represent the receptor binding activity of dK-Gly(N-Hexyl)-Peptide B (FIG. 13A) and dK-Sar-Peptide C (FIG. 13B) in 20% human plasma as determined using the GLP-receptor Luciferase assay.

[0111] FIG. 14 presents a graph of the change in body weight in DIO mice (n=8) that were subcutaneously injected a single dose of 3, 10, or 30 nmol/kg of vehicle only or one of the following compounds:

[0112] (A) Peptide C,

[0113] (B) dLys⁻¹ Sar⁰ Peptide C, or

[0114] (C) dLys⁻¹ Gly(N-Hexyl)⁰ Peptide B.

Body weights were determined on days 1, 3, 5, and 7 of the study. The mice were 5 months old with an initial average body weight of 31.2 g, and had been on a regular chow diet for approximately 5 months.

[0115] FIGS. 15A-C present graphs of blood glucose (BG) levels (mg/dL) in DIO mice (n=8) that were subcutaneously injected a single dose of 3, 10, or 30 nmol/kg of vehicle only or one of the following compounds:

[0116] (A) Peptide C,

[0117] (B) dLys⁻¹ Sar⁰ Peptide C, or

[0118] (C) dLys⁻¹ Gly(N-Hexyl)⁰ Peptide B.

Indicated blood glucose levels were taken intraperitoneally on days 1 (FIG. 15A), 3 (FIG. 15B), and 5 (FIG. 15C). The mice were 5 months old and had been on a regular chow diet for approximately 5 months.

### DETAILED DESCRIPTION

### Definitions

[0119] In describing and claiming the invention, the following terminology will be used in accordance with the definitions set forth below.

[0120] As used herein, the term “prodrug” is defined as any compound that undergoes chemical modification before exhibiting its full pharmacological effects.

[0121] As used herein the term “amino acid” encompasses any molecule containing both amino and carboxyl functional groups, wherein the amino and carboxylate groups are attached to the same carbon (the alpha carbon). The alpha carbon optionally may have one or two further organic substituents. An amino acid can be designated by its three letter code, one letter code, or in some cases by the name of its side chain. For example, an unnatural amino acid comprising a cyclohexane group attached to the alpha carbon is termed “cyclohexane” or “cyclohexyl.” For the purposes of the present disclosure designation of an amino acid without specifying its stereochemistry is intended to encompass either the L or D form of the amino acid, or a racemic mixture. However, in the instance where an amino acid is designated by its three letter code and includes a superscript number (i.e., Lys⁻¹), such a designation is intended to specify the native L form of the amino acid, whereas the D form will be specified by inclusion of a lower case d before the three letter code and superscript number (i.e., dLys⁻¹).

[0122] As used herein the term “hydroxyl acid” refers to an amino acid that has been modified to replace the alpha carbon amino group with a hydroxyl group.

[0123] As used herein the term “non-coded amino acid” encompasses any amino acid that is not an L-isomer of any of the following 20 amino acids: Ala, Cys, Asp, Glu, Phe, Gly, His, Ile, Lys, Leu, Met, Asn, Pro, Gln, Arg, Ser, Thr, Val, Trp, Tyr.

[0124] A “dipeptide” is the result of the linkage of an α-amino acid or α-hydroxyl acid to another amino acid, through a peptide bond.

[0125] As used herein the term “chemical cleavage” absent any further designation encompasses a non-enzymatic reaction that results in the breakage of a covalent chemical bond.

[0126] A “bioactive polypeptide” refers to polypeptides which are capable of exerting a biological effect in vitro and/or in vivo.

[0127] As used herein an “acylated” amino acid is an amino acid comprising an acyl group which is non-native to a naturally-occurring amino acid, regardless by the means by which it is produced. Exemplary methods of producing acylated amino acids and acylated peptides are known in the art and include acylating an amino acid before inclusion in the peptide or peptide synthesis followed by chemical acylation of the peptide. In some embodiments, the acyl group causes the peptide to have one or more of (i) a prolonged half-life in circulation, (ii) a delayed onset of action, (iii) an extended duration of action, (iv) an improved resistance to proteases, such as DPP-IV, and (v) increased potency at the glucagon superfamily peptide and/or osteocalcin peptide receptors.

[0128] As used herein, an “alkylated” amino acid is an amino acid comprising an alkyl group which is non-native to a naturally-occurring amino acid, regardless of the means by which it is produced. Exemplary methods of producing alkylated amino acids and alkylated peptides are known in the art and including alkylating an amino acid before inclusion in the peptide or peptide synthesis followed by chemical alkylation of the peptide. Without being held to any particular theory, it is believed that alkylation of peptides will achieve similar, if not the same, effects as acylation of the peptides, e.g., a prolonged half-life in circulation, a delayed onset of action, an extended duration of action, an improved resistance to proteases, such as DPP-IV, and increased potency at the glucagon superfamily peptide and/or osteocalcin peptide receptors.

[0129] As used herein a general reference to a peptide is intended to encompass peptides that have modified amino and carboxy termini. For example, an amino acid sequence designating the standard amino acids is intended to encompass standard amino acids at the N- and C-terminus as well as a corresponding hydroxyl acid at the N-terminus and/or a corresponding C-terminal amino acid modified to comprise an amide group in place of the terminal carboxylic acid.

[0130] As used herein, the term “pharmaceutically acceptable carrier” includes any of the standard pharmaceutical carriers, such as a phosphate buffered saline solution, water, emulsions such as an oil/water or water/oil, and various types of wetting agents. The term also encompasses any of the agents approved by a regulatory agency of the US Federal government or listed in the US Pharmacopeia for use in animals, including humans.

[0131] As used herein the term “pharmaceutically acceptable salt” refers to salts of compounds that retain the biological activity of the parent compound, and which are not biologically or otherwise undesirable. Many of the compounds disclosed herein are capable of forming acid and/or base salts by virtue of the presence of amino and/or carboxyl groups or groups similar thereto.

[0132] Pharmaceutically acceptable base addition salts can be prepared from inorganic and organic bases. Salts derived from inorganic bases, include by way of example only, sodium, potassium, lithium, ammonium, calcium and magnesium salts. Salts derived from organic bases include, but are not limited to, salts of primary, secondary and tertiary amines.

[0133] Pharmaceutically acceptable acid addition salts may be prepared from inorganic and organic acids. Salts derived from inorganic acids include hydrochloric acid, hydrobromic acid, sulfuric acid, nitric acid, phosphoric acid, and the like. Salts derived from organic acids include acetic acid, propionic acid, glycolic acid, pyruvic acid, oxalic acid, malic acid, malonic acid, succinic acid, maleic acid, fumaric acid, tartaric acid, citric acid, benzoic acid, cinnamic acid, mandelic acid, methanesulfonic acid, ethanesulfonic acid, p-toluene-sulfonic acid, salicylic acid, and the like.

[0134] As used herein, the term “treating” includes prophylaxis of the specific disorder or condition, or alleviation of the symptoms associated with a specific disorder or condition and/or preventing or eliminating said symptoms. For example, as used herein the term “treating diabetes” will refer in general to maintaining glucose blood levels near normal levels and may include increasing or decreasing blood glucose levels depending on a given situation.

[0135] As used herein an “effective” amount or a “therapeutically effective amount” of a prodrug refers to a nontoxic but sufficient amount of the prodrug to provide the desired effect. For example one desired effect would be the prevention or treatment of hyperglycemia. The amount that is “effective” will vary from subject to subject, depending on the age and general condition of the individual, mode of administration, and the like. Thus, it is not always possible to specify an exact “effective amount.” However, an appropriate “effective” amount in any individual case may be determined by one of ordinary skill in the art using routine experimentation.

[0136] The term, “parenteral” means not through the alimentary canal but by some other route such as subcutaneous, intramuscular, intraspinal, or intravenous.

[0137] The term “identity” as used herein relates to the similarity between two or more sequences. Identity is measured by dividing the number of identical residues by the total number of residues and multiplying the product by 100 to achieve a percentage. Thus, two copies of exactly the same sequence have 100% identity, whereas two sequences that have amino acid deletions, additions, or substitutions relative to one another have a lower degree of identity. Those skilled in the art will recognize that several computer programs, such as those that employ algorithms such as BLAST (Basic Local Alignment Search Tool, Altschul et al. (1993) J. Mol. Biol. 215:403-410) are available for determining sequence identity.

[0138] The term “glucagon related peptide” refers to those peptides which have biological activity (as agonists or antagonists) at any one or more of the glucagon, GLP-1, GLP-2, and GIP receptors and comprise an amino acid sequence that shares at least 40% sequence identity (e.g., 45%, 50%, 55%, 60%, 65%, 70%, 75%, 80%, 85%, 90%, 95%) with at least one of native glucagon, native oxyntomodulin, native exendin-4, native GLP-1, native GLP-2, or native GIP. Unless otherwise stated, any reference to an amino acid position in a glucagon related peptide (e.g. for linkage of a prodrug moiety, a conjugate moiety, a hydrophilic polymer, acylation or alkylation) refers to the position relative to the native glucagon amino acid sequence (SEQ ID NO: 701).

[0139] The term “glucagon superfamily peptide” refers to a group of peptides related in structure in their N-terminal and C-terminal regions (see, for example, Sherwood et al., Endocrine Reviews 21: 619-670 (2000)). Members of this group include all glucagon related peptides, as well as Growth Hormone Releasing Hormone (GHRH; SEQ ID NO: 719), vasoactive intestinal peptide (VIP; SEQ ID NO: 720), pituitary adenylate cyclase-activating polypeptide 27 (PACAP-27; SEQ ID NO: 721), peptide histidine isoleucine (PHI), peptide histidine methionine (PHM; SEQ ID NO: 722), Secretin (SEQ ID NO: 723), and analogs, derivatives or conjugates with up to 1, 2, 3, 4, 5, 6, 7, 8, 9 or 10 amino acid modifications relative to the native peptide. Such peptides preferably retain the ability to interact (agonist or antagonist) with receptors of the glucagon receptor superfamily. Unless otherwise stated, any reference to an amino acid position in a glucagon superfamily peptide (e.g. for linkage of a prodrug moiety, a conjugate moiety, a hydrophilic polymer, acylation or alkylation) refers to the position relative to the native glucagon amino acid sequence (SEQ ID NO: 701), see FIG. 10 for an alignment of representative glucagon superfamily peptides.

[0140] The term “GLP-1 agonist” refers to a compound that stimulates GLP-1 receptor activity, as measured by cAMP production using a validated in vitro model assay, such as that described in Example 13 of published International Application No. WO 2007/056362, published on May, 18, 2007, the disclosure of which is hereby expressly incorporated by reference into the present application.

[0141] As used herein the term “native GLP-1” is a generic term that designates GLP-1(7-36)amide (consisting of the sequence of SEQ ID NO: 704), GLP-1(7-37)acid (consisting of the sequence of SEQ ID NO: 703) or a mixture of those two compounds. As used herein, a general reference to “GLP-1” in the absence of any further designation is intended to mean native GLP-1.

[0142] As used herein the term “glucagon peptide” is a generic term that designates the natural glucagon peptide of SEQ ID NO: 701 as well as modified derivatives having one or more amino acid modifications relative to the native glucagon sequence, optionally including but not limited to substitutions at amino acid positions 1, 2, 5, 7, 8, 10, 12, 13, 14, 16, 17, 18, 24, 28 and 29. Generally, all references to a particular amino acid position by number (e.g. position 28) refer to the amino acid at that position in native glucagon (SEQ ID NO: 701) or the corresponding amino acid position in any analogs thereof. For example, a reference to “position 28” would mean the corresponding position 27 for a glucagon analog in which the first amino acid of SEQ ID NO: 701 has been deleted. Similarly, a reference to “position 28” would mean the corresponding position 29 for a glucagon analog in which one amino acid has been added before the N-terminus of SEQ ID NO: 701.

[0143] As used herein the term “GLP-1 peptide” is a generic term that designates native GLP-1 as well as modified derivatives having one or more amino acid modifications relative to the native GLP-1 sequence.

[0144] As used herein an amino acid “modification” refers to a substitution, addition or deletion of an amino acid, and includes substitution with, or addition of, any of the 20 amino acids commonly found in human proteins, as well as unusual or non-naturally occurring amino acids. Commercial sources of unusual amino acids include Sigma-Aldrich (Milwaukee, Wis.), ChemPep Inc. (Miami, Fla.), and Genzyme Pharmaceuticals (Cambridge, Mass.). Unusual amino acids may be purchased from commercial suppliers, synthesized de novo, or chemically modified or derivatized from naturally occurring amino acids. Amino acid modifications include linkage of an amino acid to a conjugate moiety, such as a hydrophilic polymer, acylation, alkylation, and/or other chemical derivatization of an amino acid.

[0145] As used herein an amino acid “substitution” refers to the replacement of one amino acid residue by a different amino acid residue.

[0146] As used herein, the term “conservative amino acid substitution” is defined herein as exchanges within one of the following five groups:

[0147] I. Small aliphatic, nonpolar or slightly polar residues:
[0148] Ala, Ser, Thr, Pro, Gly;

[0149] II. Polar, negatively charged residues and their amides:
[0150] Asp, Asn, Glu, Gln;

[0151] III. Polar, positively charged residues:
[0152] His, Arg, Lys; Ornithine (Orn)

[0153] IV. Large, aliphatic, nonpolar residues:
[0154] Met, Leu, Ile, Val, Cys, Norleucine (Nle), homocysteine

[0155] V. Large, aromatic residues:
[0156] Phe, Tyr, Trp, acetyl phenylalanine

[0157] As used herein the term “Chimera 2” refers to a glucagon peptide wherein the native glucagon amino acid sequence (SEQ ID NO: 701) comprising the following modifications: Gln at position 17, Ala at position 18, Lys at position 20, Glu at position 21, Ile at position 23, and Ala at position 24, and a C-terminal amide.

[0158] As used herein the general term “polyethylene glycol chain” or “PEG chain”, refers to mixtures of condensation polymers of ethylene oxide and water, in a branched or straight chain, represented by the general formula H(OCH₂CH₂)ₖOH, wherein k is at least 9. Absent any further characterization, the term is intended to include polymers of ethylene glycol with an average total molecular weight selected from the range of 500 to 80,000 Daltons. “Polyethylene glycol chain” or “PEG chain” is used in combination with a numeric suffix to indicate the approximate average molecular weight thereof. For example, PEG-5,000 (5 k PEG) refers to polyethylene glycol chain having a total molecular weight average of about 5,000 Daltons.

[0159] As used herein the term “pegylated” and like terms refers to a compound that has been modified from its native state by linking a polyethylene glycol chain to the compound. A “pegylated polypeptide” is a polypeptide that has a PEG chain covalently bound to the polypeptide.

[0160] As used herein a “linker” is a bond, molecule or group of molecules that binds two separate entities to one another. Linkers may provide for optimal spacing of the two entities or may further supply a labile linkage that allows the two entities to be separated from each other. Labile linkages include photocleavable groups, acid-labile moieties, base-labile moieties and enzyme-cleavable groups.

[0161] As used herein a “dimer” is a complex comprising two subunits covalently bound to one another via a linker. The term dimer, when used absent any qualifying language, encompasses both homodimers and heterodimers. A homodimer comprises two identical subunits, whereas a heterodimer comprises two subunits that differ, although the two subunits are substantially similar to one another.

[0162] The term “C₁-Cₙ alkyl” wherein n can be from 1 through 6, as used herein, represents a branched or linear alkyl group having from one to the specified number of carbon atoms. Typical C₁-C₆ alkyl groups include, but are not limited to, methyl, ethyl, n-propyl, iso-propyl, butyl, iso-butyl, sec-butyl, tert-butyl, pentyl, hexyl and the like.

[0163] The terms “C₂-Cₙ alkenyl” wherein n can be from 2 through 6, as used herein, represents an olefinically unsaturated branched or linear group having from 2 to the specified number of carbon atoms and at least one double bond. Examples of such groups include, but are not limited to, 1-propenyl, 2-propenyl (—CH₂—CH═CH₂), 1,3-butadienyl, (—CH═CHCH═CH₂), 1-butenyl (—CH═CHCH₂CH₃), hexenyl, pentenyl, and the like.

[0164] The term “C₂-Cₙ alkynyl” wherein n can be from 2 to 6, refers to an unsaturated branched or linear group having from 2 to n carbon atoms and at least one triple bond. Examples of such groups include, but are not limited to, 1-propynyl, 2-propynyl, 1-butynyl, 2-butynyl, 1-pentynyl, and the like.

[0165] As used herein the term “aryl” refers to a mono- or bicyclic carbocyclic ring system having one or two aromatic rings including, but not limited to, phenyl, naphthyl, tetrahydronaphthyl, indanyl, indenyl, and the like. The size of the aryl ring and the presence of substituents or linking groups are indicated by designating the number of carbons present. For example, the term “(C₁-C₃ alkyl)(C₆-C₁₀ aryl)” refers to a 6 to 10 membered aryl that is attached to a parent moiety via a one to three membered alkyl chain.

[0166] The term “heteroaryl” as used herein refers to a mono- or bicyclic ring system containing one or two aromatic rings and containing at least one nitrogen, oxygen, or sulfur atom in an aromatic ring. The size of the heteroaryl ring and the presence of substituents or linking groups are indicated by designating the number of carbons present. For example, the term “(C₁-Cₙ alkyl)(C₅-C₆heteroaryl)” refers to a 5 or 6 membered heteroaryl that is attached to a parent moiety via a one to “n” membered alkyl chain.

[0167] As used herein, the term “heteroalkyl” refers to a linear or branched hydrocarbon containing the indicated number of carbon atoms and at least one heteroatom in the backbone of the structure. Suitable heteroatoms for purposes herein include but are not limited to N, S, and O.

[0168] As used herein, the term “halo” refers to one or more members of the group consisting of fluorine, chlorine, bromine, and iodine.

[0169] As used herein the term “charged amino acid” refers to an amino acid that comprises a side chain that is negatively charged (i.e., deprotonated) or positively charged (i.e., protonated) in aqueous solution at physiological pH. For example negatively charged amino acids include aspartic acid, glutamic acid, cysteic acid, homocysteic acid, and homoglutamic acid, whereas positively charged amino acids include arginine, lysine and histidine. Charged amino acids include the charged amino acids among the 20 amino acids commonly found in human proteins, as well as atypical or non-naturally occurring amino acids.

[0170] As used herein the term “acidic amino acid” refers to an amino acid that comprises a second acidic moiety (i.e. other than the α-carboyxl group that all amino acids possess), including for example, a carboxylic acid or sulfonic acid group.

[0171] As used herein the term “patient” without further designation is intended to encompass any warm blooded vertebrate domesticated animal (including for example, but not limited to livestock, horses, cats, dogs and other pets), mammals, and humans.

### EMBODIMENTS

[0172] The present disclosure describes the formulation of prodrug derivatives of bioactive polypeptides useful for treating a disease, e.g., diabetes, obesity. More particularly, the prodrugs disclosed herein are formulated to enhance the half life of the parent bioactive peptide or protein, while allowing for subsequent activation of the prodrug via a non-enzymatic degradation mechanism. The ideal prodrug should be soluble in water at physiological conditions (for example, a pH of 7.2 and 37° C.), and it should be stable in the powder form for long term storage. It should also be immunologically silent and exhibit a low activity relative to the parent drug. In some embodiments, the prodrug will exhibit no more than 10% of the activity of the parent drug. In some embodiments the prodrug exhibits less than about 10%, less than about 5%, about 1%, or less than about 1% activity relative to the parent drug. Furthermore, the prodrug, when injected in the body, should be quantitatively converted to the active drug within a defined period of time. As disclosed herein, applicants have provided a general technique for producing prodrugs of a known bioactive polypeptide selected from the group consisting of glucagon superfamily peptides, including glucagon-related peptides, and osteocalcin, and analogs, derivatives and conjugates of such polypeptides, that meet each of these objectives.

[0173] More particularly, a chemoreversible prodrug is provided comprising the sequence of a glucagon superfamily peptide, including for example a glucagon related peptide, or osteocalcin, or an analog, derivative or conjugate thereof, modified to have a dipeptide prodrug element covalently bound to the peptide via an amide linkage. Covalent attachment of the dipeptide prodrug element to an active site of the glucagon superfamily peptide inhibits the activity of the polypeptide until cleavage of the dipeptide prodrug element. In some embodiments a prodrug is provided having a “non-enzymatic activation half life” (t_{1/2}) between about 1 to about 720 hrs under physiological conditions. Physiological conditions as disclosed herein are intended to include a temperature of about 35 to 40° C. and a pH of about 7.0 to about 7.4 and more typically include a pH of 7.2 to 7.4 and a temperature of 36 to 38° C.

[0174] Advantageously, the rate of cleavage, and thus activation of the prodrug, depends on the structure and stereochemistry of the dipeptide prodrug element. The prodrugs disclosed herein ultimately are chemically converted to structures that are recognized by the native receptor of the drug, wherein the speed of this chemical conversion determines the time of onset and duration of in vivo biological action. The molecular design disclosed in this application relies upon an intramolecular chemical reaction that is not dependent upon additional chemical additives, or enzymes. The speed of conversion is controlled by the chemical nature of the dipeptide substituent and its cleavage under physiological conditions. Since physiological pH and temperature are tightly regulated within a highly defined range, the speed of conversion from prodrug to drug will exhibit high intra- and interpatient reproducibility.

[0175] As disclosed herein prodrugs are provided which have extended half lives by virtue of being in a prodrug form for at least about 1 hour, and, in some embodiments, greater than about 20 hours. In some embodiments the half life of the prodrugs is about 1, 6, 8, 12, 20, 24, 48 or 72 hours. In some embodiments the half life of the prodrugs is about 100 hours or greater including half lives of up to about 168, 336, 504, 672 or 720 hours, and are converted to the active form at physiological conditions through a non-enzymatic reaction driven by inherent chemical instability. In some embodiments the non-enzymatic activation t_{1/2} time of the prodrug is between 1-100 hrs, and more typically between 12 and 72 hours, for example, between 12 and 48 hours and between 48 and 72 hours, and in some embodiments the t_{1/2} is between 24-48 hrs as measured by incubating the prodrug in a phosphate buffer solution (e.g., PBS) at 37° C. and pH of 7.2. In another embodiment the non-enzymatic activation t_{1/2} time of the prodrug is between 1 and 6 hours, for example, about 1 hour, about 2 hours, about 3 hours, about 4 hours, about 5 hours, or about 6 hours. In another embodiment the non-enzymatic activation t_{1/2} time of the prodrug is between 6 and 24 hours. The half lives of the various prodrugs are calculated by using the formula t_{1/2}=0.693/k, where ‘k’ is the first order rate constant for the degradation of the prodrug. In some embodiments, activation of the prodrug occurs after cleavage of an amide bond linked dipeptide, and formation of a diketopiperazine or diketomorpholine, and release of the active polypeptide drug. Specific dipeptides composed of natural, non-coding and/or synthetic amino acids have been identified that facilitate intramolecular decomposition under physiological conditions to release the active polypeptides.

[0176] In accordance with some embodiments a prodrug of a glucagon superfamily peptide, or osteocalcin, or an analog, derivative or conjugate thereof, is provided comprising the structure A-B-Q. In this embodiment, Q is the peptide, A is an amino acid or a hydroxy acid and B is an N-alkylated amino acid. In some embodiments the glucagon superfamily peptide is a glucagon related peptide. A and B together represent the dipeptide prodrug element that is linked to Q through formation of an amide bond between A-B and an amine of Q. In some embodiments at least one of A, B, or the amino acid of Q to which A-B is linked, is a non-coded amino acid. Furthermore, in some embodiments the dipeptide prodrug element is selected wherein chemical cleavage of A-B from Q is at least about 90% complete within about 1 to about 720 hours in PBS under physiological conditions. In a further embodiment the amino acids of the dipeptide are selected wherein the cleavage half-life of A-B from Q in PBS under physiological conditions, is not more than two to five fold the cleavage half-life of A-B from Q in a solution comprising a DPP-IV protease (including for example, human serum).

[0177] In accordance with some embodiments an aliphatic amino group of Q (e.g., a primary amine), including for example the N-terminal amine or the amino group of an amino acid side chain, is modified by the covalent linkage of the dipeptide prodrug element via an amide bond. In some embodiments the dipeptide prodrug element is linked to a side chain amino group of an amino acid present in Q, either directly or through a linking moiety. In some embodiments the linking moiety comprises an amine bearing acyl group or alkyl group. In some embodiments a glucagon superfamily peptide, e.g., glucagon related peptide, is provided comprising an acyl group or alkyl group covalently linked to the amino acid at position 10 or 20 of the glucagon superfamily peptide, wherein the acyl group or alkyl group further comprises a dipeptide prodrug element linked to the acyl group or alkyl group via an amide bond. For example, the embodiment contemplates that the prodrug is linked to an amino group of Q either directly or through a linking group, and an acyl or alkyl group is linked to the prodrug either directly or through a linking moiety.

[0178] In some embodiments the dipeptide prodrug element is linked directly to the amino acid side chain, wherein the amino acid has the general structure:

[chemical structure]

[0179] wherein n is an integer of 1-4.

[0180] Alternatively, the dipeptide prodrug element can be linked to an amino substituent present on an aryl ring of an aromatic amino acid, including for example an aromatic amino acid selected from the group consisting of amino-Phe, amino-napthyl alanine, amino tryptophan, amino-phenyl-glycine, amino-homo-Phe, and amino tyrosine. In some embodiments the dipeptide prodrug element is linked to the aromatic amino group of an amino acid having the general structure:

[chemical structure]

[0181] wherein m is an integer from 0 to 3. In some embodiments the dipeptide prodrug element is linked to the 4-amino group of an amino acid having the general structure:

[chemical structure]

[0182] wherein m is an integer from 0 to 3. In some embodiments the dipeptide prodrug element is linked to the side chain amino group of a lysine amino acid or the aromatic amino group of a 4-aminophenylalanine (substituted for a native phenylalanine or tyrosine residue of the bioactive peptide). In some embodiments the dipeptide prodrug element is linked to a primary amine present on an internal amino acid of a glucagon superfamily peptide, including a glucagon-related peptide, or osteocalcin, or an analog, derivatives or conjugate thereof.

[0183] In some embodiments the dipeptide prodrug element has the general structure A-B, wherein A is an amino acid or a hydroxyl acid and B is an N-alkylated amino acid that will be bound through an amide bond to a primary amino group of such a peptide to produce the corresponding prodrug of the peptide. In some embodiments the glucagon superfamily peptide is a glucagon related peptide. In some embodiments A and B are selected so that when the A-B dipeptide is bound to a primary amine of such a peptide through an amide bond, chemical cleavage of A-B from the peptide is at least about 90% complete within about 1 to about 720 hours in PBS under physiological conditions. In some embodiments A and/or B are amino acids in the D stereoisomer configuration. In some exemplary embodiments, A is an amino acid in the D stereoisomer configuration and B is an amino acid in the L stereoisomer configuration. In some exemplary embodiments, A is an amino acid in the L stereoisomer configuration and B is an amino acid in the D stereoisomer configuration. In some exemplary embodiments, A is an amino acid in the D stereoisomer configuration and B is an amino acid in the D stereoisomer configuration.

[0184] In accordance with some embodiments the dipeptide prodrug element can be further modified to comprise a hydrophilic moiety. In some embodiments the hydrophilic moiety is a polyethylene glycol chain. In accordance with some embodiments a polyethylene glycol chain of 40 k or higher is covalently bound to the side chain of the A or B amino acid of the dipeptide prodrug element. In another embodiment the dipeptide prodrug element is additionally or alternatively acylated or alkylated with a fatty acid or bile acid, or salt thereof, e.g. a C4 to C30 fatty acid, a C8 to C24 fatty acid, cholic acid, a C4 to C30 alkyl, a C8 to C24 alkyl, or an alkyl comprising a steroid moiety of a bile acid. Alternatively, the dipeptide prodrug element can be linked to a depot protein such as dextran or a large PEG molecule (greater or equal to 80,000 daltons) that serves to sequester the prodrug at an injection site until cleavage of the dipeptide releases the active bioactive peptide. Further modifications for dipeptide prodrugs are described below in the section concerning glucagon related peptides.

[0185] The dipeptide prodrug element is designed to cleave based upon an intramolecular chemical reaction that is not dependent upon additional chemical additives, or enzymes. More particularly, in some embodiments the dipeptide structure is selected to resist cleavage by peptidases present in mammalian sera, including for example dipeptidyl peptidase IV (DPP-IV). Accordingly, in some embodiments the rate of cleavage of the dipeptide prodrug element from the bioactive peptide is not substantially enhanced (e.g., greater than 2×) when the reaction is conducted using physiological conditions in the presence of serum proteases relative to conducting the reaction in the absence of the proteases. Thus the cleavage half-life of A-B from the bioactive peptide in PBS under physiological conditions, is not more than two, three, four or five fold the cleavage half-life of A-B from the bioactive protein in a solution comprising a DPP-IV protease. In some embodiments the solution comprising a DPP-IV protease is serum, more particularly mammalian serum, including human serum.

[0186] In accordance with some embodiments A or B of the dipeptide prodrug element, or the amino acid of the glucagon superfamily peptide to which A-B is linked is a non-coded amino acid. In some embodiments amino acid “B” is N-alkylated but is not proline. In some embodiments the N-alkylated group of amino acid B is a C₁-C₁₈ alkyl, and in some embodiments is C₁-C₆ alkyl.

[0187] In accordance with some embodiments a prodrug derivative of a glucagon superfamily peptide, comprising a dipeptide prodrug element disclosed herein, can be co-administered with a protease inhibitor, including a specific DPP-IV inhibitor (e.g., Januvia®, Merck & Co, Inc), as a means of delaying activation of the prodrug. In this embodiment the amino acids of the prodrug element are selected so the dipeptide is an acceptable substrate for DPP-IV cleavage. In some embodiments the glucagon superfamily peptide is a glucagon related peptide. The protease inhibitor can be administered in a separate composition or the prodrug and protease inhibitor can be formulated as a single composition. When administered as separate compositions, the protease inhibitor is typically administered within 1-5 hours, 1-2 hours, 30 minutes, or 10 minutes of administration of the prodrug. In some embodiments the two separate compositions are administered immediately one after the other.

[0188] In some embodiments the dipeptide prodrug element has the general structure of Formula I:

[chemical structure]

[0189] wherein

[0190] R₁, R₂, R₄ and R₈ are independently selected from the group consisting of H, C₁-C₁₈ alkyl, C₂-C₁₈ alkenyl, (C₁-C₁₈ alkyl)OH, (C₁-C₁₈ alkyl)SH, (C₂-C₃ alkyl)SCH₃, (C₁-C₄ alkyl)CONH₂, (C₁-C₄ alkyl)COOH, (C₁-C₄ alkyl)NH₂, (C₁-C₄ alkyl)NHC(NH₂⁺)NH₂, (C₀-C₄ alkyl)(C₃-C₆ cycloalkyl), (C₀-C₄ alkyl)(C₂-C₅ heterocyclic), (C₀-C₄ alkyl)(C₆-C₁₀ aryl)R₇, (C₁-C₄ alkyl)(C₃-C₉ heteroaryl), and C₁-C₁₂ alkyl(A)(W₁)C₁-C₁₂ alkyl, wherein W₁ is a heteroatom selected from the group consisting of N, S and O, or R₁ and R₂ together with the atoms to which they are attached form a C₃-C₁₂ cycloalkyl or aryl; or R₄ and R₈ together with the atoms to which they are attached form a C₃-C₆ cycloalkyl;

[0191] R₃ is selected from the group consisting of C₁-C₁₈ alkyl, (C₁-C₁₈ alkyl)OH, (C₁-C₁₈ alkyl)NH₂, (C₁-C₁₈ alkyl)SH, (C₀-C₄ alkyl)(C₃-C₆)cycloalkyl, (C₀-C₄ alkyl)(C₂-C₅ heterocyclic), (C₀-C₄ alkyl)(C₆-C₁₀ aryl)R₇, and (C₁-C₄ alkyl)(C₃-C₉ heteroaryl) or R₄ and R₃ together with the atoms to which they are attached form a 4, 5 or 6 member heterocyclic ring;

[0192] R₅ is NHR₆ or OH;

[0193] R₆ is H, C₁-C₈ alkyl or R₆ and R₂ together with the atoms to which they are attached form a 4, 5 or 6 member heterocyclic ring; and

[0194] R₇ is selected from the group consisting of H and OH.

[0195] In other embodiments the dipeptide prodrug element has the general structure of Formula I:

[chemical structure]

[0196] wherein

[0197] R₁, R₂, R₄ and R₈ are independently selected from the group consisting of H, C₁-C₁₈ alkyl, C₂-C₁₈ alkenyl, (C₁-C₁₈ alkyl)OH, (C₁-C₁₈ alkyl)SH, (C₂-C₃ alkyl)SCH₃, (C₁-C₄ alkyl)CONH₂, (C₁-C₄ alkyl)COOH, (C₁-C₄ alkyl)NH₂, (C₁-C₄ alkyl)NHC(NH₂⁺)NH₂, (C₀-C₄ alkyl)(C₃-C₆ cycloalkyl), (C₀-C₄ alkyl)(C₂-C₅ heterocyclic), (C₀-C₄ alkyl)(C₆-C₁₀ aryl)R₇, (C₁-C₄ alkyl)(C₃-C₉ heteroaryl), and C₁-C₁₂ alkyl(W₁)C₁-C₁₂ alkyl, wherein W₁ is a heteroatom selected from the group consisting of N, S and O, or R₁ and R₂ together with the atoms to which they are attached form a C₃-C₁₂ cycloalkyl; or R₄ and R₈ together with the atoms to which they are attached form a C₃-C₆ cycloalkyl;

[0198] R₃ is selected from the group consisting of C₁-C₁₈ alkyl, (C₁-C₁₈ alkyl)OH, (C₁-C₁₈ alkyl)NH₂, (C₁-C₁₈ alkyl)SH, (C₀-C₄ alkyl)(C₃-C₆)cycloalkyl, (C₀-C₄ alkyl)(C₂-C₅ heterocyclic), (C₀-C₄ alkyl)(C₆-C₁₀ aryl)R₇, and (C₁-C₄ alkyl)(C₃-C₉ heteroaryl) or R₄ and R₃ together with the atoms to which they are attached form a 4, 5 or 6 member heterocyclic ring;

[0199] R₅ is NHR₆ or OH;

[0200] R₆ is H, C₁-C₈ alkyl or R₆ and R₁ together with the atoms to which they are attached form a 4, 5 or 6 member heterocyclic ring; and

[0201] R₇ is selected from the group consisting of hydrogen, C₁-C₁₈ alkyl, C₂-C₁₈ alkenyl, (C₀-C₄ alkyl)CONH₂, (C₀-C₄ alkyl)COOH, (C₀-C₄ alkyl)NH₂, (C₀-C₄ alkyl)OH, and halo.

[0202] In some embodiments R₈ is H and R₅ is NHR₆

[0203] In some embodiments the dipeptide prodrug element has the structure of Formula I, wherein

[0204] R₁ and R₈ are independently H or C₁-C₈ alkyl;

[0205] R₂ and R₄ are independently selected from the group consisting of H, C₁-C₈ alkyl, C₂-C₈ alkenyl, (C₁-C₄ alkyl)OH, (C₁-C₄ alkyl)SH, (C₂-C₃ alkyl)SCH₃, (C₁-C₄ alkyl)CONH₂, (C₁-C₄ alkyl)COOH, (C₁-C₄ alkyl)NH₂, (C₁-C₄ alkyl)NHC(NH₂+) NH₂, (C₀-C₄ alkyl)(C₃-C₆ cycloalkyl), (C₀-C₄ alkyl)(C₂-C₅ heterocyclic), (C₀-C₄ alkyl)(C₆-C₁₀ aryl)R₇, and CH₂(C₃-C₉ heteroaryl), or R₁ and R₂ together with the atoms to which they are attached form a C₃-C₁₂ cycloalkyl or aryl;

[0206] R₅ is NHR₆; and

[0207] R₆ is H or C₁-C₈ alkyl.

[0208] In other embodiments the dipeptide prodrug element has the structure of Formula I,

[0209] wherein

[0210] R₁ and R₈ are independently H or C₁-C₈ alkyl;

[0211] R₂ and R₄ are independently selected from the group consisting of H, C₁-C₈ alkyl, C₂-C₈ alkenyl, (C₁-C₄ alkyl)OH, (C₁-C₄ alkyl)SH, (C₂-C₃ alkyl)SCH₃, (C₁-C₄ alkyl)CONH₂, (C₁-C₄ alkyl)COOH, (C₁-C₄ alkyl)NH₂, (C₁-C₄ alkyl)NHC(NH₂+)NH₂, (C₀-C₄ alkyl)(C₃-C₆ cycloalkyl), (C₀-C₄ alkyl)(C₂-C₅ heterocyclic), (C₀-C₄ alkyl)(C₆-C₁₀ aryl)R₇, and CH₂(C₃-C₉ heteroaryl), or R₁ and R₂ together with the atoms to which they are attached form a C₃-C₁₂ cycloalkyl;

[0212] R₃ is C₁-C₁₈ alkyl;

[0213] R₅ is NHR₆;

[0214] R₆ is H or C₁-C₈ alkyl; and

[0215] R₇ is selected from the group consisting of hydrogen, C₁-C₁₈ alkyl, C₂-C₁₈ alkenyl, (C₀-C₄ alkyl)CONH₂, (C₀-C₄ alkyl)COOH, (C₀-C₄ alkyl)NH₂, (C₀-C₄ alkyl)OH, and halo.

[0216] The half life of the prodrug formed in accordance with the present disclosure is determined by the substituents of the dipeptide prodrug element, its location, and the amino acid to which it is attached. For example, the prodrug may comprise a glucagon superfamily peptide wherein the dipeptide prodrug element is linked through the alpha amino group of the N-terminal amino acid of the glucagon superfamily protein. In this embodiment prodrugs having a t_{1/2} of, e.g., about 1 hour comprise a dipeptide prodrug element with the structure:

[chemical structure]

[0217] wherein

[0218] R₁ and R₂ are independently C₁-C₁₈ alkyl or aryl; or R₁ and R₂ are linked through —(CH₂)ₚ, wherein p is 2-9;

[0219] R₃ is C₁-C₁₈ alkyl;

[0220] R₄ and R₈ are each hydrogen; and

[0221] R₅ is an amine.

[0222] In other embodiments, prodrugs having a t_{1/2} of, e.g., about 1 hour comprise a dipeptide prodrug element with the structure:

[chemical structure]

[0223] wherein

[0224] R₁ and R₂ are independently C₁-C₁₈ alkyl or (C₀-C₄ alkyl)(C₆-C₁₀ aryl)R₇; or R₁ and R₂ are linked through —(CH₂)ₚ, wherein p is 2-9;

[0225] R₃ is C₁-C₁₈ alkyl;

[0226] R₄ and R₈ are each hydrogen;

[0227] R₅ is NH₂; and

[0228] R₇ is selected from the group consisting of hydrogen, C₁-C₁₈ alkyl, C₂-C₁₈ alkenyl, (C₀-C₄ alkyl)CONH₂, (C₀-C₄ alkyl)COOH, (C₀-C₄ alkyl)NH₂, (C₀-C₄ alkyl)OH, and halo.

[0229] Furthermore, prodrugs having the dipeptide prodrug element linked to the N-terminal alpha amino acid of the glucagon superfamily peptide and having a t_{1/2}, e.g., between about 6 to about 24 hours comprise a dipeptide prodrug element with the structure:

[chemical structure]

wherein R₁ and R₂ are independently selected from the group consisting of hydrogen, C₁-C₁₈ alkyl and aryl, or R₁ and R₂ are linked through (CH₂)ₚ, wherein p is 2-9;

[0230] R₃ is C₁-C₁₈ alkyl or R₃ and R₄ together with the atoms to which they are attached form a 4-12 heterocyclic ring;

[0231] R₄ and R₈ are independently selected from the group consisting of hydrogen, C₁-C₈ alkyl and aryl; and R₅ is an amine;

[0232] with the proviso that both R₁ and R₂ are not hydrogen and provided that one of R₄ or R₈ is hydrogen.

[0233] In some embodiments, prodrugs having the dipeptide prodrug element linked to the N-terminal alpha amino acid of the glucagon superfamily peptide and having a t_{1/2}, e.g., between about 12 to about 72 hours, or in some embodiments between about 12 to about 48 hours, comprise a dipeptide prodrug element with the structure:

[chemical structure]

wherein R₁ and R₂ are independently selected from the group consisting of hydrogen, C₁-C₁₈ alkyl, (C₁-C₁₈ alkyl)OH, (C₁-C₄ alkyl)NH₂, and (C₀-C₄ alkyl)(C₆-C₁₀ aryl)R₇, or R₁ and R₂ are linked through (CH₂)ₚ, wherein p is 2-9;

[0234] R₃ is C₁-C₁₈ alkyl or R₃ and R₄ together with the atoms to which they are attached form a 4-12 heterocyclic ring;

[0235] R₄ and R₈ are independently selected from the group consisting of hydrogen, C₁-C₈ alkyl and (C₀-C₄ alkyl)(C₆-C₁₀ aryl)R₇;

[0236] R₅ is NH₂; and

[0237] R₇ is selected from the group consisting of H, C₁-C₁₈ alkyl, C₂-C₁₈ alkenyl, (C₀-C₄ alkyl)CONH₂, (C₀-C₄ alkyl)COOH, (C₀-C₄ alkyl)NH₂, (C₀-C₄ alkyl)OH, and halo;

[0238] with the proviso that both R₁ and R₂ are not hydrogen and provided that at least one of R₄ or R₈ is hydrogen.

[0239] In some embodiments, prodrugs having the dipeptide prodrug element linked to the N-terminal amino acid of the glucagon superfamily peptide and having a t_{1/2}, e.g., between about 12 to about 72 hours, or in some embodiments between about 12 to about 48 hours, comprise a dipeptide prodrug element with the structure:

[chemical structure]

wherein R₁ and R₂ are independently selected from the group consisting of hydrogen, C₁-C₈ alkyl and (C₁-C₄ alkyl)NH₂, or R₁ and R₂ are linked through (CH₂)ₚ, wherein p is 2-9;

[0240] R₃ is C₁-C₈ alkyl or R₃ and R₄ together with the atoms to which they are attached form a 4-6 heterocyclic ring;

[0241] R₄ is selected from the group consisting of hydrogen and C₁-C₈ alkyl; and

[0242] R₅ is NH₂;

[0243] with the proviso that both R₁ and R₂ are not hydrogen.

[0244] In other embodiments, prodrugs having the dipeptide prodrug element linked to the N-terminal amino acid of the glucagon superfamily peptide and having a t_{1/2}, e.g., between about 12 to about 72 hours, or in some embodiments between about 12 to about 48 hours, comprise a dipeptide prodrug element with the structure:

[chemical structure]

[0245] wherein

[0246] R₁ and R₂ are independently selected from the group consisting of hydrogen, C₁-C₈ alkyl and (C₁-C₄ alkyl)NH₂;

[0247] R₃ is C₁-C₆ alkyl;

[0248] R₄ is hydrogen; and

[0249] R₅ is NH₂;

[0250] with the proviso that both R₁ and R₂ are not hydrogen.

[0251] In some embodiments, prodrugs having the dipeptide prodrug element linked to the N-terminal amino acid of the glucagon superfamily peptide and having a t_{1/2}, e.g., between about 12 to about 72 hours, or in some embodiments between about 12 to about 48 hours, comprise a dipeptide prodrug element with the structure:

[chemical structure]

[0252] wherein

[0253] R₁ and R₂ are independently selected from the group consisting of hydrogen and C₁-C₈ alkyl, (C₁-C₄ alkyl)NH₂, or R₁ and R₂ are linked through (CH₂)ₚ, wherein p is 2-9;

[0254] R₃ is C₁-C₈ alkyl;

[0255] R₄ is (C₀-C₄ alkyl)(C₆-C₁₀ aryl)R₇;

[0256] R₅ is NH₂; and

[0257] R₇ is selected from the group consisting of hydrogen, C₁-C₈ alkyl and (C₀-C₄ alkyl)OH;

[0258] with the proviso that both R₁ and R₂ are not hydrogen.

[0259] In some embodiments the glucagon superfamily peptide is a glucagon related peptide. In any of these embodiments, the glucagon superfamily peptide is any of SEQ ID NOs: 1-684, 701-731, 801-919, 1001-1262, 1301-1371, 1401-1518, 1701-1776, and 1801-1921

[0260] In addition a prodrug having the dipeptide prodrug element linked to the N-terminal alpha amino acid of the glucagon superfamily peptide and having a t_{1/2}, e.g., of about 72 to about 168 hours is provided wherein the dipeptide prodrug element has the structure:

[chemical structure]

wherein R₁ is selected from the group consisting of hydrogen, C₁-C₈ alkyl and aryl;

[0261] R₃ is C₁-C₈ alkyl;

[0262] R₄ and R₈ are each hydrogen; and

[0263] R₅ is an amine or N-substituted amine or a hydroxyl;

with the proviso that, if R₁ is alkyl or aryl, then R₁ and R₅ together with the atoms to which they are attached form a 4-11 heterocyclic ring.

[0264] In some embodiments, the dipeptide prodrug element has the structure:

[chemical structure]

[0265] wherein R₁ is selected from the group consisting of hydrogen, C₁-C₈ alkyl and (C₀-C₄ alkyl)(C₆-C₁₀ aryl)R₇;

[0266] R₃ is C₁-C₁₈ alkyl;

[0267] R₄ and R₈ are each hydrogen;

[0268] R₅ is NHR₆ or OH;

[0269] R₆ is H, C₁-C₈ alkyl, or R₆ and R₁ together with the atoms to which they are attached form a 4, 5 or 6 member heterocyclic ring; and

[0270] R₇ is selected from the group consisting of hydrogen, C₁-C₁₈ alkyl, C₂-C₁₈ alkenyl, (C₀-C₄ alkyl)CONH₂, (C₀-C₄ alkyl)COOH, (C₀-C₄ alkyl)NH₂, (C₀-C₄ alkyl)OH, and halo;

[0271] with the proviso that, if R₁ is alkyl or (C₀-C₄ alkyl)(C₆-C₁₀ aryl)R₇, then R₁ and R₅ together with the atoms to which they are attached form a 4-11 heterocyclic ring. In some embodiments the glucagon superfamily peptide is a glucagon related peptide.

[0272] In some embodiments the dipeptide prodrug element is linked to a side chain amine of an internal amino acid of the glucagon superfamily peptide. In this embodiment prodrugs having a t_{1/2}, e.g., of about 1 hour have the structure:

[chemical structure]

[0273] wherein

[0274] R₁ and R₂ are independently C₁-C₈ alkyl or aryl; or R₁ and R₂ are linked through (CH₂)ₚ, wherein p is 2-9;

[0275] R₃ is C₁-C₁₈ alkyl;

[0276] R₄ and R₈ are each hydrogen; and R₅ is an amine.

[0277] In some embodiments, prodrugs having a t_{1/2}, e.g., of about 1 hour have the structure:

[chemical structure]

[0278] wherein

[0279] R₁ and R₂ are independently C₁-C₈ alkyl or (C₀-C₄ alkyl)(C₆-C₁₀ aryl)R₇; or R₁ and R₂ are linked through —(CH₂)ₚ—, wherein p is 2-9;

[0280] R₃ is C₁-C₁₈ alkyl;

[0281] R₄ and R₈ are each hydrogen;

[0282] R₅ is NH₂; and

[0283] R₇ is selected from the group consisting of hydrogen, C₁-C₁₈ alkyl, C₂-C₁₈ alkenyl, (C₀-C₄ alkyl)CONH₂, (C₀-C₄ alkyl)COOH, (C₀-C₄ alkyl)NH₂, (C₀-C₄ alkyl)OH, and halo.

[0284] Furthermore, prodrugs having a t_{1/2}, e.g., between about 6 to about 24 hours and having the dipeptide prodrug element linked to a internal amino acid side chain comprise a dipeptide prodrug element with the structure:

[chemical structure]

wherein R₁ and R₂ are independently selected from the group consisting of hydrogen, C₁-C₈ alkyl and aryl, or R₁ and R₂ are linked through —(CH₂)ₚ, wherein p is 2-9;

[0285] R₃ is C₁-C₁₈ alkyl or R₃ and R₄ together with the atoms to which they are attached form a 4-12 heterocyclic ring;

[0286] R₄ and R₈ are independently C₁-C₁₈ alkyl or aryl; and

[0287] R₅ is an amine or N-substituted amine;

[0288] with the proviso that both R₁ and R₂ are not hydrogen and provided that one of R₄ or R₈ is hydrogen.

[0289] In some embodiments, prodrugs having a t_{1/2}, e.g., between about 12 to about 72 hours, or in some embodiments between about 12 to about 48 hours, and having the dipeptide prodrug element linked to a internal amino acid side chain comprise a dipeptide prodrug element with the structure:

[chemical structure]

wherein R₁ and R₂ are independently selected from the group consisting of hydrogen, C₁-C₈ alkyl, and (C₀-C₄ alkyl)(C₆-C₁₀ aryl)R₇, or R₁ and R₂ are linked through —(CH₂)ₚ—, wherein p is 2-9;

[0290] R₃ is C₁-C₁₈ alkyl or R₃ and R₄ together with the atoms to which they are attached form a 4-12 heterocyclic ring;

[0291] R₄ and R₈ are independently hydrogen, C₁-C₁₈ alkyl or (C₀-C₄ alkyl)(C₆-C₁₀ aryl)R₇;

[0292] R₅ is NHR₆;

[0293] R₆ is H or C₁-C₈ alkyl, or R₆ and R₂ together with the atoms to which they are attached form a 4, 5 or 6 member heterocyclic ring; and

[0294] R₇ is selected from the group consisting of hydrogen, C₁-C₁₈ alkyl, C₂-C₁₈ alkenyl, (C₀-C₄ alkyl)CONH₂, (C₀-C₄ alkyl)COOH, (C₀-C₄ alkyl)NH₂, (C₀-C₄ alkyl)OH, and halo;

[0295] with the proviso that both R₁ and R₂ are not hydrogen and provided that at least one of R₄ or R₈ is hydrogen. In some embodiments the glucagon superfamily peptide is a glucagon related peptide.

[0296] In addition a prodrug having a t_{1/2}, e.g., of about 72 to about 168 hours and having the dipeptide prodrug element linked to a internal amino acid side chain of the glucagon superfamily peptide is provided wherein the dipeptide prodrug element has the structure:

[chemical structure]

[0297] wherein R₁ and R₂ are independently selected from the group consisting of hydrogen, C₁-C₁₈ alkyl and aryl;

[0298] R₃ is C₁-C₁₈ alkyl;

[0299] R₄ and R₈ are each hydrogen; and

[0300] R₅ is an amine or N-substituted amine or a hydroxyl;

with the proviso that, if R₁ and R₂ are both independently an alkyl or aryl, either R₁ or R₂ is linked through (CH2)ₚ to R₅, wherein p is 2-9.

[0301] In some embodiments, a prodrug having a t_{1/2}, e.g., of about 72 to about 168 hours and having the dipeptide prodrug element linked to a internal amino acid side chain of the glucagon superfamily peptide is provided wherein the dipeptide prodrug element has the structure:

[chemical structure]

[0302] wherein R₁ is selected from the group consisting of hydrogen, C₁-C₁₈ alkyl and (C₀-C₄ alkyl)(C₆-C₁₀ aryl)R₇;

[0303] R₃ is C₁-C₁₈ alkyl;

[0304] R₄ and R₈ are each hydrogen;

[0305] R₅ is NHR₆ or OH;

[0306] R₆ is H or C₁-C₈ alkyl, or R₆ and R₁ together with the atoms to which they are attached form a 4, 5 or 6 member heterocyclic ring; and

R₇ is selected from the group consisting of hydrogen, C₁-C₁₈ alkyl, C₂-C₁₈ alkenyl, (C₀-C₄ alkyl)CONH₂, (C₀-C₄ alkyl)COOH, (C₀-C₄ alkyl)NH₂, (C₀-C₄ alkyl)OH, and halo; with the proviso that, if R₁ and R₂ are both independently an alkyl or (C₀-C₄ alkyl)(C₆-C₁₀ aryl)R₇, either R₁ or R₂ is linked through (CH₂)ₚ to R₅, wherein p is 2-9. In some embodiments the glucagon superfamily peptide is a glucagon related peptide. In any of these embodiments, the glucagon superfamily peptide is any of SEQ ID NOs: 1-684, 701-731, 801-919, 1001-1262, 1301-1371, 1401-1518, 1701-1776, and 1801-1921.

[0307] In some embodiments the dipeptide prodrug element is linked to a side chain amine of an internal amino acid of the glucagon superfamily peptide wherein the internal amino acid comprises the structure of Formula II:

[chemical structure]

[0308] wherein

[0309] n is an integer selected from 1 to 4. In some embodiments n is 3 or 4 and in some embodiments the internal amino acid is lysine. In some embodiments the dipeptide prodrug element is linked to a primary amine on a side chain of an amino acid located at position 12, 16, 17, 18, 20, 28, or 29 of the glucagon superfamily peptide. In some embodiments the amino acid at 12, 16, 17, 18, 20, 28, or 29 comprises the structure of Formula II:

[chemical structure]

[0310] wherein n is an integer selected from 1 to 4 and the dipeptide prodrug element is linked to the amino acid side chain via an amide bond. In some embodiments n is 4 and the amino acid is located at position 20. In some embodiments the glucagon superfamily peptide is a glucagon related peptide.

[0311] In a further embodiment the dipeptide prodrug element is linked to the glucagon superfamily peptide via an amine present on an aryl group of an aromatic amino acid. In some embodiments the aromatic amino acid is an internal amino acid of the glucagon superfamily peptide, however the aromatic amino acid can also be the N-terminal amino acid. In some embodiments the glucagon superfamily peptide is a glucagon related peptide. In some embodiments the aromatic amino acid is selected from the group consisting of amino-Phe, amino-napthyl alanine, amino tryptophan, amino-phenyl-glycine, amino-homo-Phe, and amino tyrosine. In some embodiments the primary amine that forms an amide bond with the dipeptide prodrug element is in the para-position on the aryl group. In some embodiments the aromatic amine comprises the structure of Formula III:

[chemical structure]

[0312] wherein m is an integer from 1 to 3.

[0313] For those embodiments wherein the dipeptide prodrug element is linked to the glucagon superfamily peptide via an amine present on an aryl group of an aromatic amino acid, prodrugs having a t_{1/2}, e.g., of about 1 hour have a dipeptide structure of:

[chemical structure]

wherein R₁ and R₂ are independently C₁-C₁₈ alkyl or aryl;

[0314] R₃ is C₁-C₁₈ alkyl or R₃ and R₄ together with the atoms to which they are attached form a 4-12 heterocyclic ring;

[0315] R₄ and R₈ are independently selected from the group consisting of hydrogen, C₁-C₁₈ alkyl and aryl; and R₅ is an amine or a hydroxyl.

[0316] In some embodiments, the dipeptide prodrug element is linked to the glucagon superfamily peptide via an amine present on an aryl group of an aromatic amino acid, prodrugs having a t_{1/2}, e.g., of about 1 hour have a dipeptide structure of:

[chemical structure]

[0317] wherein R₁ and R₂ are independently C₁-C₁₈ alkyl or (C₀-C₄ alkyl)(C₆-C₁₀ aryl)R₇;

[0318] R₃ is C₁-C₁₈ alkyl or R₃ and R₄ together with the atoms to which they are attached form a 4-12 heterocyclic ring;

[0319] R₄ and R₈ are independently selected from the group consisting of hydrogen, C₁-C₁₈ alkyl and (C₀-C₄ alkyl)(C₆-C₁₀ aryl)R₇;

[0320] R₅ is NH₂ or OH; and

[0321] R₇ is selected from the group consisting of hydrogen, C₁-C₁₈ alkyl, C₂-C₁₈ alkenyl, (C₀-C₄ alkyl)CONH₂, (C₀-C₄ alkyl)COOH, (C₀-C₄ alkyl)NH₂, (C₀-C₄ alkyl)OH, and halo. In some embodiments the glucagon superfamily peptide is a glucagon related peptide. Furthermore, prodrugs having the dipeptide prodrug element is linked via an aromatic amino acid and having a t_{1/2}, e.g., of about 6 to about 24 hours are provided wherein the dipeptide comprises a structure of:

[chemical structure]

[0322] wherein

[0323] R₁ is selected from the group consisting of hydrogen, C₁-C₁₈ alkyl and aryl, or R₁ and R₂ are linked through —(CH₂)ₚ, wherein p is 2-9;

[0324] R₃ is C₁-C₁₈ alkyl or R₃ and R₄ together with the atoms to which they are attached form a 4-6 heterocyclic ring;

[0325] R₄ and R₈ are independently selected from the group consisting of hydrogen, C₁-C₁₈ alkyl and aryl; and R₅ is an amine or N-substituted amine.

[0326] In some embodiments, prodrugs having the dipeptide prodrug element linked via an aromatic amino acid and having a t_{1/2}, e.g., of about 6 to about 24 hours are provided wherein the dipeptide comprises a structure of:

[chemical structure]

[0327] wherein

[0328] R₁ is selected from the group consisting of hydrogen, C₁-C₁₈ alkyl, (C₁-C₁₈ alkyl)OH, (C₁-C₄ alkyl)NH₂, and (C₀-C₄ alkyl)(C₆-C₁₀ aryl)R₇;

[0329] R₃ is C₁-C₁₈ alkyl or R₃ and R₄ together with the atoms to which they are attached form a 4-6 heterocyclic ring;

[0330] R₄ and R₈ are independently selected from the group consisting of hydrogen, C₁-C₁₈ alkyl and (C₀-C₄ alkyl)(C₆-C₁₀ aryl)R₇;

[0331] R₅ is NHR₆;

[0332] R₆ is H, C₁-C₈ alkyl, or R₆ and R₁ together with the atoms to which they are attached form a 4, 5 or 6 member heterocyclic ring; and

[0333] R₇ is selected from the group consisting of hydrogen, C₁-C₁₈ alkyl, C₂-C₁₈ alkenyl, (C₀-C₄ alkyl)CONH₂, (C₀-C₄ alkyl)COOH, (C₀-C₄ alkyl)NH₂, (C₀-C₄ alkyl)OH, and halo.

[0334] In addition, prodrugs having the dipeptide prodrug element is linked via an aromatic amino acid and having a t_{1/2}, e.g., of about 72 to about 168 hours are provided wherein the dipeptide comprises a structure of:

[chemical structure]

[0335] wherein R₁ and R₂ are independently selected from the group consisting of hydrogen, C₁-C₈ alkyl and aryl;

[0336] R₃ is C₁-C₁₈ alkyl or R₃ and R₄ together with the atoms to which they are attached form a 4-6 heterocyclic ring;

[0337] R₄ and R₈ are each hydrogen; and

[0338] R₅ is selected from the group consisting of amine, N-substituted amine and hydroxyl.

[0339] In some embodiments, prodrugs having the dipeptide prodrug element linked via an aromatic amino acid and having a t_{1/2}, e.g., of about 72 to about 168 hours are provided wherein the dipeptide comprises a structure of:

[chemical structure]

[0340] wherein R₁ and R₂ are independently selected from the group consisting of hydrogen, C₁-C₈ alkyl, (C₁-C₄ alkyl)COOH, and (C₀-C₄ alkyl)(C₆-C₁₀ aryl)R₇, or R₁ and R₅ together with the atoms to which they are attached form a 4-11 heterocyclic ring;

[0341] R₃ is C₁-C₁₈ alkyl or R₃ and R₄ together with the atoms to which they are attached form a 4-6 heterocyclic ring;

[0342] R₄ is hydrogen or forms a 4-6 heterocyclic ring with R₃;

[0343] R₈ is hydrogen;

[0344] R₅ is NHR₆ or OH;

[0345] R₆ is H or C₁-C₈ alkyl, or R₆ and R₁ together with the atoms to which they are attached form a 4, 5 or 6 member heterocyclic ring; and

[0346] R₇ is selected from the group consisting of hydrogen, C₁-C₁₈ alkyl, C₂-C₁₈ alkenyl, (C₀-C₄ alkyl)CONH₂, (C₀-C₄ alkyl)COOH, (C₀-C₄ alkyl)NH₂, (C₀-C₄ alkyl)OH, and halo.

[0347] In some embodiments the dipeptide prodrug element is linked to an aromatic amino acid via a primary amine present as an aryl substituent of the aromatic amino acid, wherein the aromatic amino acid is located at position 10, 13, 22, or 25 of the glucagon superfamily peptide (based on the numbering for glucagon, see e.g., FIG. 10). In some embodiments the dipeptide prodrug element linked aromatic amino acid amino acid is located at position 22 of the glucagon superfamily peptide.

[0348] In accordance with some embodiments the dipeptide prodrug element is linked at the N-terminal amine of a glucagon superfamily peptide, including for example a glucagon related peptide, or osteocalcin, as well as analogs, derivatives and conjugates of the foregoing, wherein the dipeptide prodrug element comprises the structure:

[chemical structure]

wherein R₁ is selected from the group consisting of H and C₁-C₈ alkyl;

[0349] R₂ and R₄ are independently selected from the group consisting of H, C₁-C₈ alkyl, C₂-C₈ alkenyl, (C₁-C₄ alkyl)OH, (C₁-C₄ alkyl)SH, (C₂-C₃ alkyl)SCH₃, (C₁-C₄ alkyl)CONH₂, (C₁-C₄ alkyl)COOH, (C₁-C₄ alkyl)NH₂, (C₁-C₄ alkyl)NHC(NH₂⁺) NH₂, (C₀-C₄ alkyl)(C₃-C₆ cycloalkyl), (C₀-C₄ alkyl)(C₆-C₁₀ aryl)R₇, CH₂(C₅-C₉ heteroaryl), or R₁ and R₂ together with the atoms to which they are attached form a C₃-C₆ cycloalkyl;

[0350] R₃ is selected from the group consisting of C₁-C₈ alkyl, (C₃-C₆)cycloalkyl or R₄ and R₃ together with the atoms to which they are attached form a 5 or 6 member heterocyclic ring;

[0351] R₅ is NHR₆ or OH;

[0352] R₆ is H, or R₆ and R₂ together with the atoms to which they are attached form a 5 or 6 member heterocyclic ring; and

[0353] R₇ is selected from the group consisting of H and OH. In some embodiments R₁ is H or C₁-C₈ alkyl, R₂ is selected from the group consisting of H, C₁-C₆ alkyl, CH₂OH, (C₁-C₄ alkyl)NH₂, (C₃-C₆ cycloalkyl) and CH₂(C₆ aryl)R₇ or R₆ and R₂ together with the atoms to which they are attached form a 5 member heterocyclic ring, R₃ is C₁-C₆ alkyl, and R₄ is selected from the group consisting of H, C₁-C₄ alkyl, (C₃-C₆)cycloalkyl, (C₁-C₄ alkyl)OH, (C₁-C₄ alkyl)SH and (C₀-C₄ alkyl)(C₆ aryl)R₇, or R₃ and R₄ together with the atoms to which they are attached form a 5 member heterocyclic ring. In a further embodiment R₃ is CH₃, R₅ is NHR₆, and in an alternative further embodiment R₃ and R₄ together with the atoms to which they are attached form a 5 member heterocyclic ring and R₅ is NHR₆.

[0354] In accordance with another embodiment the dipeptide prodrug element is linked at the N-terminal amine of a glucagon superfamily peptide, including for example a glucagon related peptide, or osteocalcin, as well as analogs, derivatives and conjugates of the foregoing, wherein the dipeptide prodrug element comprises the structure:

[chemical structure]

wherein R₁ is selected from the group consisting of H and C₁-C₈ alkyl;

[0355] R₂ and R₄ are independently selected from the group consisting of H, C₁-C₈ alkyl, C₂-C₈ alkenyl, (C₁-C₄ alkyl)OH, (C₁-C₄ alkyl)SH, (C₂-C₃ alkyl)SCH₃, (C₁-C₄ alkyl)CONH₂, (C₁-C₄ alkyl)COOH, (C₁-C₄ alkyl)NH₂, (C₁-C₄ alkyl)NHC(NH₂⁺)NH₂, (C₀-C₄ alkyl)(C₃-C₆ cycloalkyl), (C₀-C₄ alkyl)(C₆-C₁₀ aryl)R₇, CH₂(C₅-C₉ heteroaryl), or R₁ and R₂ together with the atoms to which they are attached form a C₃-C₆ cycloalkyl;

[0356] R₃ is selected from the group consisting of C₁-C₈ alkyl, (C₃-C₆)cycloalkyl or R₄ and R₃ together with the atoms to which they are attached form a 5 or 6 member heterocyclic ring;

[0357] R₅ is NHR₆ or OH;

[0358] R₆ is H, or R₆ and R₂ together with the atoms to which they are attached form a 5 or 6 member heterocyclic ring; and

[0359] R₇ is selected from the group consisting of hydrogen, C₁-C₁₈ alkyl, C₂-C₁₈ alkenyl, (C₀-C₄ alkyl)CONH₂, (C₀-C₄ alkyl)COOH, (C₀-C₄ alkyl)NH₂, (C₀-C₄ alkyl)OH, and halo. In some embodiments R₁ is H or C₁-C₈ alkyl, R₂ is selected from the group consisting of H, C₁-C₆ alkyl, CH₂OH, (C₁-C₄ alkyl)NH₂, (C₃-C₆ cycloalkyl) and CH₂(C₆ aryl)R₇ or R₆ and R₂ together with the atoms to which they are attached form a 5 member heterocyclic ring, R₃ is C₁-C₆ alkyl, and R₄ is selected from the group consisting of H, C₁-C₄ alkyl, (C₃-C₆)cycloalkyl, (C₁-C₄ alkyl)OH, (C₁-C₄ alkyl)SH and (C₀-C₄ alkyl)(C₆ aryl)R₇, or R₃ and R₄ together with the atoms to which they are attached form a 5 member heterocyclic ring. In a further embodiment R₃ is CH₃, R₅ is NHR₆, and in an alternative further embodiment R₃ and R₄ together with the atoms to which they are attached form a 5 member heterocyclic ring and R₅ is NHR₆.

[0360] In some embodiments, Q is any of SEQ ID NOs: 1-684, 701-731, 801-919, 1001-1262, 1301-1371, 1401-1518, 1701-1776, and 1801-1921.

### Glucagon Related Peptides

[0361] In certain aspects the instant disclosure concerns glucagon related peptides (as part of the designated group “Q”). The term glucagon related peptide refers to those peptides which have biological activity (as agonists or antagonists) at any one or more of the glucagon, GLP-1, GLP-2, and GIP receptors and comprise an amino acid sequence that shares at least 40% sequence identity (e.g., 45%, 50%, 55%, 60%, 65%, 70%, 75%, 80%, 85%, 90%, 95%) with at least one of native glucagon, native oxyntomodulin, native exendin-4, native GLP-1, native GLP-2, or native GIP. It is understood that all possible activity subsets of glucagon related peptides are contemplated, e.g. peptides which have biological activity (as agonists or antagonists) at any one or more of the glucagon or GLP-1 or GIP receptors, together with all possible subsets of sequence identity to each listed native peptide, e.g., comprise an amino acid sequence that shares at least 40%, 45%, 50%, 55%, 60%, 65%, 70%, 75%, 80%, 85%, 90%, or 95% sequence identity with native glucagon over the length of native glucagon. In some embodiments of the invention, the glucagon related peptide is a peptide having glucagon receptor agonist activity, GIP receptor agonist activity, glucagon receptor/GLP-1 receptor co-agonist activity, glucagon receptor antagonist activity, or glucagon receptor antagonist & GLP-1 receptor agonist activity. In some embodiments, the peptide retains an alpha-helix conformation in the C-terminal half of the molecule. In some embodiments, the peptide retains positions involved in receptor interaction or signaling, e.g. position 3 of glucagon, or position 7, 10, 12, 13, 15 or 17 of (1-37)GLP-1. Accordingly, the glucagon related peptide can be a peptide of Class 1, Class 2, Class 3, Class 4, and/or Class 5, each of which is further described herein.

[0362] In accordance with some embodiments the dipeptide prodrug element can be attached via an amide linkage to any of the bioactive compounds previously disclosed in International application nos. PCT/US2008/08608 (filed on Jan. 3, 2008), PCT/US2008/053857 (filed on Feb. 13, 2008), PCT/US2009/47437 (filed on Jun. 16, 2009), PCT/US2009/47438 (filed on Jun. 16, 2009), PCT/US2009/47447 (filed on Jun. 16, 2009), PCT/US2008/080973 (filed on Oct. 23, 2008), and PCT/US2008/081333 (filed on Oct. 27, 2008), the disclosures of which are hereby expressly incorporated by reference into the present application. The dipeptide prodrug element disclosed herein can, in some exemplary embodiments, be linked to the bioactive peptides disclosed in PCT/US2008/08608, PCT/US2008/053857, PCT/US2009/47437, PCT/US2009/47438, PCT/US2009/47447, PCT/US2008/08097, and PCT/US2008/081333 either through the N-terminal amine or to the side chain amino group of a lysine at position 20 or the aromatic amino group of a 4-amino phenylalanine substituted for the amino acid at position 22 of any of the disclosed bioactive peptides. In some exemplary embodiments the dipeptide prodrug element disclosed herein is linked via an amide bond to the N-terminal amine of a bioactive peptide disclosed in PCT/US2008/08608, PCT/US2008/053857, PCT/US2009/47437, PCT/US2009/47438, and PCT/US2009/47447, PCT/US2008/08097, and PCT/US2008/081333. In some embodiments, the glucagon superfamily peptide is any of SEQ ID NOs: 1-684, 701-731, 801-919, 1001-1262, 1301-1371, 1401-1518, 1701-1776, and 1801-1921.

[0363] Modifications

[0364] The glucagon related peptide can comprise the native glucagon amino acid sequence (SEQ ID NO; 701) with modifications. In exemplary embodiments, the glucagon related peptide may comprise a total of 1, up to 2, up to 3, up to 4, up to 5, up to 6, up to 7, up to 8, up to 9, or up to 10 amino acid modifications relative to the native glucagon sequence, e.g. conservative or non-conservative substitutions. Modifications and substitutions described herein are, in certain aspects made at specific positions within a glucagon related peptide wherein the numbering of the position corresponds to the numbering of glucagon (SEQ ID NO: 701). In some embodiments 1, 2, 3, 4 or 5 non-conservative substitutions are carried out at any of positions 2, 5, 7, 10, 11, 12, 13, 14, 17, 18, 19, 20, 21, 24, 27, 28 or 29 and up to 5 further conservative substitutions are carried out at any of these positions. In some embodiments 1, 2, or 3 amino acid modifications are carried out within amino acids at positions 1-16, and 1, 2 or 3 amino acid modifications are carried out within amino acids at positions 17-26. In some embodiments, such glucagon related peptides retain at least 22, 23, 24, 25, 26, 27 or 28 of the naturally occurring amino acids at the corresponding positions in native glucagon (e.g. have 1-7, 1-5 or 1-3 modifications relative to naturally occurring glucagon).

[0365] DPP-IV Resistance

[0366] In some embodiments, the glucagon related peptide comprises a modification at position 1 or 2 to reduce susceptibility to cleavage by dipeptidyl peptidase IV. More particularly, in some embodiments, position 1 of a glucagon related peptide (e.g., selected from those in FIG. 10) is substituted with an amino acid selected from the group consisting of D-histidine, alpha, alpha-dimethyl imidiazole acetic acid (DMIA), N-methyl histidine, alpha-methyl histidine, imidazole acetic acid, desaminohistidine, hydroxyl-histidine, acetyl-histidine and homo-histidine. More particularly, in some embodiments, position 2 of the glucagon related peptide is substituted with an amino acid selected from the group consisting of D-serine, D-alanine, valine, glycine, N-methyl serine, and aminoisobutyric acid. In some embodiments, position 2 of the glucagon related peptide is not D-serine.

[0367] Hydrophilic Moieties

[0368] In some embodiments, the glucagon related peptide, (e.g., a Class 1 glucagon related peptide, Class 2 glucagon related peptide, Class 3 glucagon related peptide, Class 4 glucagon related peptides or Class 5 glucagon related peptide) is attached (covalently bonded) to a hydrophilic moiety. Hydrophilic moieties can be attached to the glucagon related peptide under any suitable conditions used to react a protein with an activated polymer molecule. Any means known in the art can be used, including via acylation, reductive alkylation, Michael addition, thiol alkylation or other chemoselective conjugation/ligation methods through a reactive group on the PEG moiety (e.g., an aldehyde, amino, ester, thiol, α-haloacetyl, maleimido or hydrazino group) to a reactive group on the target compound (e.g., an aldehyde, amino, ester, thiol, α-haloacetyl, maleimido or hydrazino group). Activating groups which can be used to link the water soluble polymer to one or more proteins include without limitation sulfone, maleimide, sulfhydryl, thiol, triflate, tresylate, azidirine, oxirane and 5-pyridyl. If attached to the peptide by reductive alkylation, the polymer selected should have a single reactive aldehyde so that the degree of polymerization is controlled. See, for example, Kinstler et al., Adv. Drug. Delivery Rev. 54: 477-485 (2002); Roberts et al., Adv. Drug Delivery Rev. 54: 459-476 (2002); and Zalipsky et al., Adv. Drug Delivery Rev. 16: 157-182 (1995).

[0369] With regard to the glucagon related peptides of Classes 1 to 3, further activating groups which can be used to link the water soluble polymer to one or more proteins include an alpha-halogenated acyl group (e.g., alpha-iodo acetic acid, alpha-bromoacetic acid, alpha-chloroacetic acid). In some embodiments, wherein the glucagon related peptide is a Class 1, Class 2, or Class 3 glucagon related peptide, an amino acid comprising a thiol is modified with maleimide-activated PEG in a Michael addition reaction to result in a PEGylated peptide comprising the thioether linkage shown below:

[chemical structure]

[0370] In other embodiments, the thiol of an amino acid of a Class 1, Class 2, or Class 3 glucagon related peptide is modified with a haloacetyl-activated PEG in a nucleophilic substitution reaction to result in a PEGylated peptide comprising the thioether linkage shown below:

[chemical structure]

[0371] Suitable hydrophilic moieties include polyethylene glycol (PEG), polypropylene glycol, polyoxyethylated polyols (e.g., POG), polyoxyethylated sorbitol, polyoxyethylated glucose, polyoxyethylated glycerol (POG), polyoxyalkylenes, polyethylene glycol propionaldehyde, copolymers of ethylene glycol/propylene glycol, monomethoxy-polyethylene glycol, mono-(C1-C10) alkoxy- or aryloxy-polyethylene glycol, carboxymethylcellulose, polyacetals, polyvinyl alcohol (PVA), polyvinyl pyrrolidone, poly-1,3-dioxolane, poly-1,3,6-trioxane, ethylene/maleic anhydride copolymer, poly (.beta.-amino acids) (either homopolymers or random copolymers), poly(n-vinyl pyrrolidone)polyethylene glycol, propropylene glycol homopolymers (PPG) and other polyakylene oxides, polypropylene oxide/ethylene oxide copolymers, colonic acids or other polysaccharide polymers, Ficoll or dextran and mixtures thereof. Dextrans are polysaccharide polymers of glucose subunits, predominantly linked by α1-6 linkages. Dextran is available in many molecular weight ranges, e.g., about 1 kD to about 100 kD, or from about 5, 10, 15 or 20 kD to about 20, 30, 40, 50, 60, 70, 80 or 90 kD.

[0372] In some embodiments the hydrophilic moiety is a polyethylene glycol (PEG) chain or other water soluble polymer that is covalently linked to the side chain of an amino acid residue at one or more of positions 16, 17, 21, 24, 29, 40 of said glucagon related peptide, within a C-terminal extension, or at the C-terminal amino acid. In some embodiments, the native amino acid at that position is substituted with an amino acid having a side chain suitable for crosslinking with hydrophilic moieties, to facilitate linkage of the hydrophilic moiety to the peptide. Exemplary amino acids include Cys, Lys, Orn, homo-Cys, or acetyl phenylalanine (Ac-Phe). In other embodiments, an amino acid modified to comprise a hydrophilic group is added to the peptide at the C-terminus.

[0373] The hydrophilic moiety, e.g., polyethylene glycol chain, in accordance with some embodiments has a molecular weight selected from the range of about 500 to about 40,000 Daltons. In some embodiments the polyethylene glycol chain has a molecular weight selected from the range of about 500 to about 5,000 Daltons, or about 1,000 to about 5,000 Daltons. In another embodiment the hydrophilic moiety, e.g., polyethylene glycol chain, has a molecular weight of about 10,000 to about 20,000 Daltons. In yet other exemplary embodiments the hydrophilic moiety, e.g. polyethylene glycol chain, has a molecular weight of about 20,000 to about 40,000 Daltons.

[0374] Linear or branched hydrophilic polymers are contemplated. Resulting preparations of conjugates may be essentially monodisperse or polydisperse, and may have about 0.5, 0.7, 1, 1.2, 1.5 or 2 polymer moieties per peptide.

[0375] Acylation

[0376] In some embodiments, the glucagon related peptide (e.g. a Class 1 glucagon related peptide, Class 2 glucagon related peptide, Class 3 glucagon related peptide, Class 4 glucagon related peptide, Class 4 glucagon related peptides or Class 5 glucagon related peptide), is modified to comprise an acyl group. For example, the glucagon related peptide may be one of Class 1, Class 2, or Class 3, and may comprise an acyl group which is non-native to a naturally-occurring amino acid. Acylation can be carried out at any position within the glucagon related peptide, including any of positions 1-29, a position within a C-terminal extension, or the C-terminal amino acid, provided that the activity exhibited by the non-acylated glucagon related peptide is retained upon acylation. For example, if the unacylated peptide has glucagon agonist activity, then the acylated peptide retains the glucagon agonist activity. Also for example, if the unacylated peptide has glucagon antagonist activity, then the acylated peptide retains the glucagon antagonist activity. For instance, if the unacylated peptide has GLP-1 agonist activity, then the acylated peptide retains GLP-1 agonist activity. Nonlimiting examples include acylation at positions 5, 7, 10, 11, 12, 13, 14, 16, 17, 18, 19, 20, 21, 24, 27, 28, or 29 (according to the amino acid numbering of wild type glucagon). With regard to Class 1, Class 2, and Class 3 glucagon related peptides, acylation may occur at any of positions 5, 7, 10, 11, 12, 13, 14, 16, 17, 18, 19, 20, 21, 24, 27, 28, 29, 30, 37, 38, 39, 40, 41, 42, or 43 (according to the amino acid numbering of wild type glucagon). The acyl group can be covalently linked directly to an amino acid of the glucagon related peptide, or indirectly to an amino acid of the glucagon related peptide via a spacer, wherein the spacer is positioned between the amino acid of the glucagon related peptide and the acyl group. Glucagon related peptides may be acylated at the same amino acid position where a hydrophilic moiety is linked, or at a different amino acid position. Nonlimiting examples include acylation at position 10 (according to the amino acid numbering of the wild type glucagon) and pegylation at one or more positions in the C-terminal portion of the glucagon peptide, e.g., position 24, 28 or 29 (according to the amino acid numbering of the wild type glucagon), within a C-terminal extension, or at the C-terminus (e.g., through adding a C-terminal Cys).

[0377] In a specific aspect of the invention, the glucagon related peptide is modified to comprise an acyl group by direct acylation of an amine, hydroxyl, or thiol of a side chain of an amino acid of the glucagon related peptide. In some embodiments, the glucagon related peptide is directly acylated through the side chain amine, hydroxyl, or thiol of an amino acid. In some embodiments, acylation is at position 10, 20, 24, or 29 (according to the amino acid numbering of the wild type glucagon). In this regard, the acylated glucagon related peptide can comprise the amino acid sequence of SEQ ID NO: 701, or a modified amino acid sequence thereof comprising one or more of the amino acid modifications described herein, with at least one of the amino acids at positions 10, 20, 24, and 29 (according to the amino acid numbering of the wild type glucagon) modified to any amino acid comprising a side chain amine, hydroxyl, or thiol. In some specific embodiments of the invention, the direct acylation of the glucagon related peptide occurs through the side chain amine, hydroxyl, or thiol of the amino acid at position 10 (according to the amino acid numbering of the wild type glucagon).

[0378] In some embodiments, the amino acid comprising a side chain amine is an amino acid of Formula I:

[chemical structure]

In some exemplary embodiments, the amino acid of Formula I, is the amino acid wherein n is 4 (Lys) or n is 3 (Orn).

[0379] In other embodiments, the amino acid comprising a side chain hydroxyl is an amino acid of Formula II:

[chemical structure]

In some exemplary embodiments, the amino acid of Formula II is the amino acid wherein n is 1 (Ser).

[0380] In yet other embodiments, the amino acid comprising a side chain thiol is an amino acid of Formula III:

[chemical structure]

In some exemplary embodiments, the amino acid of Formula III is the amino acid wherein n is 1 (Cys).

[0381] In yet other embodiments, in which the glucagon related peptide is a Class 1, Class 2, or Class 3 glucagon related peptide, the amino acid comprising a side chain amine, hydroxyl, or thiol is a disubstituted amino acid comprising the same structure of Formula I, Formula II, or Formula III, except that the hydrogen bonded to the alpha carbon of the amino acid of Formula I, Formula II, or Formula III is replaced with a second side chain.

[0382] In some embodiments of the invention, the acylated glucagon related peptide comprises a spacer between the peptide and the acyl group. In some embodiments, the glucagon related peptide is covalently bound to the spacer, which is covalently bound to the acyl group. In some exemplary embodiments, the glucagon related peptide is modified to comprise an acyl group by acylation of an amine, hydroxyl, or thiol of a spacer, which spacer is attached to a side chain of an amino acid at position 10, 20, 24, or 29 (according to the amino acid numbering of the wild type glucagon), or at the C-terminal amino acid of the glucagon related peptide. The amino acid to which the spacer is attached can be any amino acid comprising a moiety which permits linkage to the spacer. For example, an amino acid comprising a side chain —NH₂, —OH, or —COOH (e.g., Lys, Orn, Ser, Asp, or Glu) is suitable. Also, with regard to Class 1, Class 2, and Class 3 glucagon related peptides, an amino acid (e.g., a singly or doubly α-substituted amino acid) comprising a side chain —NH₂, —OH, or —COOH (e.g., Lys, Orn, Ser, Asp, or Glu) is suitable. In this respect, the acylated glucagon related peptide can comprise the amino acid sequence of SEQ ID NO: 701, or a modified amino acid sequence thereof comprising one or more of the amino acid modifications described herein, with at least one of the amino acids at positions 10, 20, 24, and 29 (according to the amino acid numbering of the wild type glucagon) modified to any amino acid comprising a side chain amine, hydroxyl, or carboxylate.

[0383] In some embodiments, the spacer is an amino acid comprising a side chain amine, hydroxyl, or thiol, or a dipeptide or tripeptide comprising an amino acid comprising a side chain amine, hydroxyl, or thiol. In some embodiments, the amino acid spacer is not γ-Glu. In some embodiments, the dipeptide spacer is not γ-Glu-γ-Glu.

[0384] When acylation occurs through an amine group of the amino acid of the spacer, the acylation can occur through the alpha amine of the amino acid or a side chain amine. In the instance in which the alpha amine is acylated, the spacer amino acid can be any amino acid. For example, the spacer amino acid can be a hydrophobic amino acid, e.g., Gly, Ala, Val, Leu, Ile, Trp, Met, Phe, Tyr. In some embodiments in which the glucagon related peptide is a Class 1, Class 2, or Class 3 glucagon related peptide, the spacer amino acid can be, for example, a hydrophobic amino acid, e.g., Gly, Ala, Val, Leu, Be, Trp, Met, Phe, Tyr, 6-amino hexanoic acid, 5-aminovaleric acid, 7-aminoheptanoic acid, 8-aminooctanoic acid. Alternatively, the spacer amino acid can be an acidic residue, e.g., Asp and Glu. In the instance in which the side chain amine of the spacer amino acid is acylated, the spacer amino acid is an amino acid comprising a side chain amine, e.g., an amino acid of Formula I (e.g., Lys or Orn). In this instance, it is possible for both the alpha amine and the side chain amine of the spacer amino acid to be acylated, such that the glucagon peptide is diacylated. Embodiments of the invention include such diacylated molecules.

[0385] When acylation occurs through a hydroxyl group of the amino acid of the spacer, the amino acid or one of the amino acids of the dipeptide or tripeptide can be an amino acid of Formula II. In a specific exemplary embodiment, the amino acid is Ser.

[0386] When acylation occurs through a thiol group of the amino acid of the spacer, the amino acid or one of the amino acids of the dipeptide or tripeptide can be an amino acid of Formula III. In a specific exemplary embodiment, the amino acid is Cys.

[0387] In some embodiments, the spacer comprises a hydrophilic bifunctional spacer. In a specific embodiment, the spacer comprises an amino poly(alkyloxy)carboxylate. In this regard, the spacer can comprise, for example, NH₂(CH₂CH₂O)ₙ(CH₂)ₘCOOH, wherein m is any integer from 1 to 6 and n is any integer from 2 to 12, such as, e.g., 8-amino-3,6-dioxaoctanoic acid, which is commercially available from Peptides International, Inc. (Louisville, Ky.).

[0388] In some embodiments, pertaining only to Class 1, Class 2, and Class 3 glucagon related peptides, the spacer comprises a hydrophilic bifunctional spacer. In certain embodiments, the hydrophilic bifunctional spacer attached to the Class 1, Class 2, or Class 3 glucagon related peptide comprises two or more reactive groups, e.g., an amine, a hydroxyl, a thiol, and a carboxyl group or any combinations thereof. In certain embodiments, the hydrophilic bifunctional spacer attached to the Class 1, Class 2, or Class 3 glucagon related peptide comprises a hydroxyl group and a carboxylate. In other embodiments, the hydrophilic bifunctional spacer attached to the Class 1, Class 2, or Class 3 glucagon related peptide comprises an amine group and a carboxylate. In other embodiments, the hydrophilic bifunctional spacer attached to the Class 1, Class 2, or Class 3 glucagon related peptide comprises a thiol group and a carboxylate.

[0389] In some embodiments in which the glucagon related peptide is a Class 1, Class 2, or Class 3 glucagon related peptide, the spacer is a hydrophobic bifunctional spacer. Hydrophobic bifunctional spacers are known in the art. See, e.g., Bioconjugate Techniques, G. T. Hermanson (Academic Press, San Diego, Calif., 1996), which is incorporated by reference in its entirety. In certain embodiments, the hydrophobic bifunctional spacer attached to the Class 1, Class 2, or Class 3 glucagon related peptide comprises two or more reactive groups, e.g., an amine, a hydroxyl, a thiol, and a carboxyl group or any combinations thereof. In certain embodiments, the hydrophobic bifunctional spacer attached to the Class 1, Class 2, or Class 3 glucagon related peptide comprises a hydroxyl group and a carboxylate. In other embodiments, the hydrophobic bifunctional spacer attached to the Class 1, Class 2, or Class 3 glucagon related peptide comprises an amine group and a carboxylate. In other embodiments, the hydrophobic bifunctional spacer attached to the Class 1, Class 2, or Class 3 glucagon related peptide comprises a thiol group and a carboxylate. Suitable hydrophobic bifunctional spacers comprising a carboxylate and a hydroxyl group or a thiol group are known in the art and include, for example, 8-hydroxyoctanoic acid and 8-mercaptooctanoic acid.

[0390] In some embodiments, the bifunctional spacer attached to the Class 1, Class 2, or Class 3 glucagon related peptide is not a dicarboxylic acid comprising an unbranched, methylene of 1 to 7 carbon atoms between the carboxylate groups. In some embodiments, the bifunctional spacer attached to the Class 1, Class 2, or Class 3 glucagon related peptide is a dicarboxylic acid comprising an unbranched, methylene of 1-7 carbon atoms between the carboxylate groups.

[0391] The spacer (e.g., amino acid, dipeptide, tripeptide, hydrophilic bifunctional spacer, or hydrophobic bifunctional spacer) in specific embodiments, wherein the glucagon related peptide is a Class 1, Class 2, or Class 3 glucagon related peptide, is 3 to 10 atoms (e.g., 6 to 10 atoms, (e.g., 6, 7, 8, 9, or 10 atoms) in length. In more specific embodiments in which the glucagon related peptide is a Class 1, Class 2, or Class 3 glucagon related peptide, the spacer is about 3 to 10 atoms (e.g., 6 to 10 atoms) in length and the acyl group is a C12 to C18 fatty acyl group, e.g., C14 fatty acyl group, C16 fatty acyl group, such that the total length of the spacer and acyl group is 14 to 28 atoms, e.g., about 14, 15, 16, 17, 18, 19, 20, 21, 22, 23, 24, 25, 26, 27, or 28 atoms. In some embodiments, in which the glucagon related peptide is a Class 1, Class 2, or Class 3 glucagon related peptide the length of the spacer and acyl group is 17 to 28 (e.g., 19 to 26, 19 to 21) atoms.

[0392] In accordance with certain embodiments in which the glucagon related peptide is a Class 1, Class 2, or Class 3 glucagon related peptide, the bifunctional spacer can be a synthetic or naturally occurring amino acid (including, but not limited to, any of those described herein) comprising an amino acid backbone that is 3 to 10 atoms in length (e.g., 6-amino hexanoic acid, 5-aminovaleric acid, 7-aminoheptanoic acid, and 8-aminooctanoic acid). Alternatively, the spacer attached to the Class 1, Class 2, or Class 3 glucagon related peptide can be a dipeptide or tripeptide spacer having a peptide backbone that is 3 to 10 atoms (e.g., 6 to 10 atoms) in length. Each amino acid of the dipeptide or tripeptide spacer attached to the Class 1, Class 2, or Class 3 glucagon related peptide can be the same as or different from the other amino acid(s) of the dipeptide or tripeptide and can be independently selected from the group consisting of: naturally-occurring and/or non-naturally occurring amino acids, including, for example, any of the D or L isomers of the naturally-occurring amino acids (Ala, Cys, Asp, Glu, Phe, Gly, His, Ile, Lys, Leu, Met, Asn, Pro, Arg, Ser, Thr, Val, Trp, Tyr), or any D or L isomers of the non-naturally occurring amino acids selected from the group consisting of: β-alanine (β-Ala), N-α-methyl-alanine (Me-Ala), aminobutyric acid (Abu), γ-aminobutyric acid (γ-Abu), aminohexanoic acid (ε-Ahx), aminoisobutyric acid (Aib), aminomethylpyrrole carboxylic acid, aminopiperidinecarboxylic acid, aminoserine (Ams), aminotetrahydropyran-4-carboxylic acid, arginine N-methoxy-N-methyl amide, β-aspartic acid (β-Asp), azetidine carboxylic acid, 3-(2-benzothiazolyl)alanine, α-tert-butylglycine, 2-amino-5-ureido-n-valeric acid (citrulline, Cit), β-Cyclohexylalanine (Cha), acetamidomethyl-cysteine, diaminobutanoic acid (Dab), diaminopropionic acid (Dpr), dihydroxyphenylalanine (DOPA), dimethylthiazolidine (DMTA), γ-Glutamic acid (γ-Glu), homoserine (Hse), hydroxyproline (Hyp), isoleucine N-methoxy-N-methyl amide, methyl-isoleucine (MeIle), isonipecotic acid (Isn), methyl-leucine (MeLeu), methyl-lysine, dimethyl-lysine, trimethyl-lysine, methanoproline, methionine-sulfoxide (Met(O)), methionine-sulfone (Met(O₂)), norleucine (Nle), methyl-norleucine (Me-Nle), norvaline (Nva), ornithine (Orn), para-aminobenzoic acid (PABA), penicillamine (Pen), methylphenylalanine (MePhe), 4-Chlorophenylalanine (Phe(4-Cl)), 4-fluorophenylalanine (Phe(4-F)), 4-nitrophenylalanine (Phe(4-NO₂)), 4-cyanophenylalanine ((Phe(4-CN)), phenylglycine (Phg), piperidinylalanine, piperidinylglycine, 3,4-dehydroproline, pyrrolidinylalanine, sarcosine (Sar), selenocysteine (Sec), O-Benzyl-phosphoserine, 4-amino-3-hydroxy-6-methylheptanoic acid (Sta), 4-amino-5-cyclohexyl-3-hydroxypentanoic acid (ACHPA), 4-amino-3-hydroxy-5-phenylpentanoic acid (AHPPA), 1,2,3,4,-tetrahydro-isoquinoline-3-carboxylic acid (Tic), tetrahydropyranglycine, thienylalanine (Thi), O-benzyl-phosphotyrosine, O-Phosphotyrosine, methoxytyrosine, ethoxytyrosine, O-(bis-dimethylamino-phosphono)-tyrosine, tyrosine sulfate tetrabutylamine, methyl-valine (MeVal), 1-amino-1-cyclohexane carboxylic acid (Acx), aminovaleric acid, beta-cyclopropyl-alanine (Cpa), propargylglycine (Prg), allylglycine (Alg), 2-amino-2-cyclohexyl-propanoic acid (2-Cha), tertbutylglycine (Tbg), vinylglycine (Vg), 1-amino-1-cyclopropane carboxylic acid (Acp), 1-amino-1-cyclopentane carboxylic acid (Acpe), and alkylated 3-mercaptopropionic acid.

[0393] In some embodiments in which the glucagon related peptide is a Class 1, Class 2, or Class 3 glucagon related peptide, the spacer comprises an overall negative charge, e.g., comprises one or two negatively charged amino acids. In some embodiments in which the glucagon related peptide is a Class 1, Class 2, or Class 3 glucagon related peptide, the dipeptide is not any of the dipeptides of general structure A-B, wherein A is selected from the group consisting of Gly, Gln, Ala, Arg, Asp, Asn, Ile, Leu, Val, Phe, and Pro, wherein B is selected from the group consisting of Lys, His, Trp. In some embodiments in which the glucagon related peptide is a Class 1, Class 2, or Class 3 glucagon related peptide, the dipeptide spacer is selected from the group consisting of: Ala-Ala, β-Ala-β-Ala, Leu-Leu, Pro-Pro, γ-aminobutyric acid-γ-aminobutyric acid, and γ-Glu-γ-Glu.

[0394] In some embodiments of the invention in which the glucagon related peptide is a Class 1, Class 2, or Class 3 glucagon related peptide, the glucagon related peptide is modified to comprise an acyl group by acylation of a long chain alkane by the glucagon related peptide. In specific aspects in which the glucagon related peptide is a Class 1, Class 2, or Class 3 glucagon related peptide, the long chain alkane comprises an amine, hydroxyl, or thiol group (e.g. octadecylamine, tetradecanol, and hexadecanethiol) which reacts with a carboxyl group, or activated form thereof, of the glucagon related peptide. The carboxyl group, or activated form thereof, of the Class 1, Class 2, or Class 3 glucagon related peptide can be part of a side chain of an amino acid (e.g., glutamic acid, aspartic acid) of the glucagon related peptide or can be part of the peptide backbone.

[0395] In certain embodiments, the Class 1, Class 2, or Class 3 glucagon related peptide is modified to comprise an acyl group by acylation of the long chain alkane by a spacer which is attached to the glucagon peptide. In specific aspects, the long chain alkane comprises an amine, hydroxyl, or thiol group which reacts with a carboxyl group, or activated form thereof, of the spacer. Suitable spacers comprising a carboxyl group, or activated form thereof, are described herein and include, for example, bifunctional spacers, e.g., amino acids, dipeptides, tripeptides, hydrophilic bifunctional spacers and hydrophobic bifunctional spacers.

[0396] As used herein, the term “activated form of a carboxyl group” refers to a carboxyl group with the general formula R(C═O)X, wherein X is a leaving group and R is the glucagon related peptide or the spacer. For example, activated forms of a carboxyl groups may include, but are not limited to, acyl chlorides, anhydrides, and esters. In some embodiments, the activated carboxyl group is an ester with a N-hydroxysuccinimide (NHS) leaving group.

[0397] With regard to these aspects of the invention, in which a long chain alkane is acylated by the Class 1, Class 2, or Class 3 glucagon related peptide or the spacer, the long chain alkane may be of any size and can comprise any length of carbon chain. The long chain alkane can be linear or branched. In certain aspects in which the glucagon related peptide is a Class 1, Class 2, or Class 3 glucagon related peptide, the long chain alkane is a C4 to C30 alkane. For example, the long chain alkane can be any of a C4 alkane, C6 alkane, C8 alkane, C10 alkane, C12 alkane, C14 alkane, C16 alkane, C18 alkane, C20 alkane, C22 alkane, C24 alkane, C26 alkane, C28 alkane, or a C30 alkane. In some embodiments in which the glucagon related peptide is a Class 1, Class 2, or Class 3 glucagon related peptide, the long chain alkane comprises a C8 to C20 alkane, e.g., a C14 alkane, C16 alkane, or a C18 alkane.

[0398] Also, in some embodiments in which the glucagon related peptide is a Class 1, Class 2, or Class 3 glucagon related peptide, an amine, hydroxyl, or thiol group of the glucagon related peptide is acylated with a cholesterol acid. In a specific embodiment, the Class 1, Class 2, or Class 3 glucagon related peptide is linked to the cholesterol acid through an alkylated des-amino Cys spacer, i.e., an alkylated 3-mercaptopropionic acid spacer.

[0399] Suitable methods of peptide acylation via amines, hydroxyls, and thiols are known in the art. See, for example, Miller, Biochem Biophys Res Commun 218: 377-382 (1996); Shimohigashi and Stammer, Int J Pept Protein Res 19: 54-62 (1982); and Previero et al., Biochim Biophys Acta 263: 7-13 (1972) (for methods of acylating through a hydroxyl); and San and Silvius, J Pept Res 66: 169-180 (2005) (for methods of acylating through a thiol); Bioconjugate Chem. “Chemical Modifications of Proteins: History and Applications” pages 1, 2-12 (1990); Hashimoto et al., Pharmacuetical Res. “Synthesis of Palmitoyl Derivatives of Insulin and their Biological Activity” Vol. 6, No: 2 pp. 171-176 (1989).

[0400] The acyl group of the acylated glucagon related peptide can be of any size, e.g., any length carbon chain, and can be linear or branched. In some specific embodiments of the invention, the acyl group is a C4 to C30 fatty acid. For example, the acyl group can be any of a C4 fatty acid, C6 fatty acid, C8 fatty acid, C10 fatty acid, C12 fatty acid, C14 fatty acid, C16 fatty acid, C18 fatty acid, C20 fatty acid, C22 fatty acid, C24 fatty acid, C26 fatty acid, C28 fatty acid, or a C30 fatty acid. In some embodiments, the acyl group is a C8 to C20 fatty acid, e.g., a C14 fatty acid or a C16 fatty acid.

[0401] In an alternative embodiment, the acyl group is a bile acid. The bile acid can be any suitable bile acid, including, but not limited to, cholic acid, chenodeoxycholic acid, deoxycholic acid, lithocholic acid, taurocholic acid, glycocholic acid, and cholesterol acid.

[0402] The acylated glucagon related peptides described herein can be further modified to comprise a hydrophilic moiety. In some specific embodiments the hydrophilic moiety can comprise a polyethylene glycol (PEG) chain. The incorporation of a hydrophilic moiety can be accomplished through any suitable means, such as any of the methods described herein. In this regard, the acylated glucagon related peptide can comprise SEQ ID NO: 701, including any of the modifications described herein, in which at least one of the amino acids at position 10, 20, 24, and 29 (according to the amino acid numbering of the wild type glucagon) comprise an acyl group and at least one of the amino acids at position 16, 17, 21, 24, or 29 (according to the amino acid numbering of the wild type glucagon), a position within a C-terminal extension, or the C-terminal amino acid are modified to a Cys, Lys, Orn, homo-Cys, or Ac-Phe, and the side chain of the amino acid is covalently bonded to a hydrophilic moiety (e.g., PEG). In some embodiments, the acyl group is attached to position 10 (according to the amino acid numbering of the wild type glucagon), optionally via a spacer comprising Cys, Lys, Orn, homo-Cys, or Ac-Phe, and the hydrophilic moiety is incorporated at a Cys residue at position 24.

[0403] Alternatively, the acylated glucagon related peptide can comprise a spacer, wherein the spacer is both acylated and modified to comprise the hydrophilic moiety. Nonlimiting examples of suitable spacers include a spacer comprising one or more amino acids selected from the group consisting of Cys, Lys, Orn, homo-Cys, and Ac-Phe.

[0404] Alkylation

[0405] In accordance with some embodiments, the glucagon related peptide, e.g., a Class 1 glucagon related peptide, Class 2 glucagon related peptide, Class 3 glucagon related peptide, Class 4 glucagon peptide, or Class 5 glucagion related peptide, is modified to comprise an alkyl group which is attached to the glucagon related peptide via an ether, thioether, or amino linkage for purposes of prolonging half-life in circulation and/or delaying the onset of and/or extending the duration of action and/or improving resistance to proteases such as DPP-IV. In exemplary embodiments in which the glucagon related peptide is a Class 1, Class 2, or Class 3 glucagon related peptide, the glucagon related peptide comprises an alkyl group which is non-native to a naturally-occurring amino acid.

[0406] Alkylation can be carried out at any position within the glucagon related peptide, including any of positions 1-29, a position within a C-terminal extension, or the C-terminal amino acid, provided that an agonist or antagonist activity of the glucagon related peptide with respect to glucagon, GLP-1 or other glucagon-related peptide receptor is retained. In some embodiments, if the unalkylated peptide has glucagon agonist activity, then the alkylated peptide retains glucagon agonist activity is retained. In other embodiments, if the unalkylated peptide has glucagon antagonist activity, then the alkylated peptide retains glucagon antagonist activity. In some embodiments, if the unalkylated peptide has GLP-1 agonist activity, then the alkylated peptide retains GLP-1 agonist activity. Nonlimiting examples include alkylation at positions 5, 7, 10, 11, 12, 13, 14, 16, 17, 18, 19, 20, 21, 24, 27, 28, or 29 (according to the amino acid numbering of wild type glucagon). With regard to Class 1, Class 2, and Class 3 glucagon related peptides, alkylation can occur at positions 5, 7, 10, 11, 12, 13, 14, 16, 17, 18, 19, 20, 21, 24, 27, 28, 29, 30, 37, 38, 39, 40, 41, 42, or 43 (according to the amino acid numbering of wild type glucagon). The alkyl group can be covalently linked directly to an amino acid of the glucagon related peptide, or indirectly to an amino acid of the glucagon related peptide via a spacer, wherein the spacer is positioned between the amino acid of the glucagon related peptide and the alkyl group. Glucagon related peptides may be alkylated at the same amino acid position where a hydrophilic moiety is linked, or at a different amino acid position. Nonlimiting examples include alkylation at position 10 (according to the amino acid numbering of wild type glucagon) and pegylation at one or more positions in the C-terminal portion of the glucagon related peptide, e.g., position 24, 28 or 29 (according to the amino acid numbering of wild type glucagon), within a C-terminal extension, or at the C-terminus (e.g., through adding a C-terminal Cys).

[0407] In a specific aspect of the invention, the glucagon related peptide is modified to comprise an alkyl group by direct alkylation of an amine, hydroxyl, or thiol of a side chain of an amino acid of the glucagon related peptide. In some embodiments, the glucagon related peptide is directly alkylated through the side chain amine, hydroxyl, or thiol of an amino acid. In some embodiments, alkylation is at position 10, 20, 24, or 29 (according to the amino acid numbering of wild type glucagon). In this regard, the alkylated glucagon related peptide can comprise the amino acid sequence of SEQ ID NO: 701, or a modified amino acid sequence thereof comprising one or more of the amino acid modifications described herein, with at least one of the amino acids at positions 10, 20, 24, and 29 (according to the amino acid numbering of wild type glucagon) modified to any amino acid comprising a side chain amine, hydroxyl, or thiol. In some specific embodiments of the invention, the direct alkylation of the glucagon related peptide occurs through the side chain amine, hydroxyl, or thiol of the amino acid at position 10 (according to the amino acid numbering of wild type glucagon).

[0408] In some embodiments, the amino acid comprising a side chain amine is an amino acid of Formula I. In some exemplary embodiments, the amino acid of Formula I, is the amino acid wherein n is 4 (Lys) or n is 3 (Orn).

[0409] In other embodiments, the amino acid comprising a side chain hydroxyl is an amino acid of Formula II. In some exemplary embodiments, the amino acid of Formula II is the amino acid wherein n is 1 (Ser).

[0410] In yet other embodiments, the amino acid comprising a side chain thiol is an amino acid of Formula III. In some exemplary embodiments, the amino acid of Formula II is the amino acid wherein n is 1 (Cys).

[0411] In yet other embodiments, in which the glucagon related peptide is a Class 1, Class 2, or Class 3 glucagon related peptide, the amino acid comprising a side chain amine, hydroxyl, or thiol is a disubstituted amino acid comprising the same structure of Formula I, Formula II, or Formula III, except that the hydrogen bonded to the alpha carbon of the amino acid of Formula I, Formula II, or Formula III is replaced with a second side chain.

[0412] In some embodiments of the invention, the alkylated glucagon related peptide comprises a spacer between the peptide and the alkyl group. In some embodiments, the glucagon related peptide is covalently bound to the spacer, which is covalently bound to the alkyl group. In some exemplary embodiments, the glucagon related peptide is modified to comprise an alkyl group by alkylation of an amine, hydroxyl, or thiol of a spacer, which spacer is attached to a side chain of an amino acid at position 10, 20, 24, or 29 (according to the amino acid numbering of wild type glucagon) of the glucagon related peptide. The amino acid to which the spacer is attached can be any amino acid comprising a moiety which permits linkage to the spacer. With regard to Class 1, Class 2, and Class 3 glucagon related peptides, the amino acid to which the spacer is attached can be any amino acid (e.g., a singly α-substituted amino acid or an α,α-disubstituted amino acid) comprising a moiety which permits linkage to the spacer. For example, an amino acid comprising a side chain —NH₂, —OH, or —COOH (e.g., Lys, Orn, Ser, Asp, or Glu) is suitable. In this respect, the alkylated glucagon related peptide can comprise the amino acid sequence of SEQ ID NO: 701, or a modified amino acid sequence thereof comprising one or more of the amino acid modifications described herein, with at least one of the amino acids at positions 10, 20, 24, and 29 (according to the amino acid numbering of wild type glucagon) modified to any amino acid comprising a side chain amine, hydroxyl, or carboxylate.

[0413] In some embodiments, the spacer is an amino acid comprising a side chain amine, hydroxyl, or thiol or a dipeptide or tripeptide comprising an amino acid comprising a side chain amine, hydroxyl, or thiol. In some embodiments, the amino acid spacer is not γ-Glu. In some embodiments, the dipeptide spacer is not γ-Glu-γ-Glu.

[0414] When alkylation occurs through an amine group of the amino acid of the spacer the alkylation can occur through the alpha amine of the amino acid or a side chain amine. In the instance in which the alpha amine is alkylated, the spacer amino acid can be any amino acid. For example, the spacer amino acid can be a hydrophobic amino acid, e.g., Gly, Ala, Val, Leu, Ile, Trp, Met, Phe, Tyr. Alternatively, the spacer amino acid can be an acidic residue, e.g., Asp and Glu. In exemplary embodiments in which the glucagon related peptide is a Class 1, Class 2, or Class 3 glucagon related peptide, the spacer amino acid can be a hydrophobic amino acid, e.g., Gly, Ala, Val, Leu, Ile, Trp, Met, Phe, Tyr, 6-amino hexanoic acid, 5-aminovaleric acid, 7-aminoheptanoic acid, 8-aminooctanoic acid. Alternatively, the spacer amino acid attached to the Class 1, Class 2, or Class 3 glucagon related peptide can be an acidic residue, e.g., Asp and Glu, provided that the alkylation occurs on the alpha amine of the acidic residue. In the instance in which the side chain amine of the spacer amino acid is alkylated, the spacer amino acid is an amino acid comprising a side chain amine, e.g., an amino acid of Formula I (e.g., Lys or Orn). In this instance, it is possible for both the alpha amine and the side chain amine of the spacer amino acid to be alkylated, such that the glucagon peptide is dialkylated. Embodiments of the invention include such dialkylated molecules.

[0415] When alkylation occurs through a hydroxyl group of the amino acid of the spacer, the amino acid or one of the amino acids of the spacer can be an amino acid of Formula II. In a specific exemplary embodiment, the amino acid is Ser.

[0416] When alkylation occurs through a thiol group of the amino acid of the spacer, the amino acid or one of the amino acids of the spacer can be an amino acid of Formula III. In a specific exemplary embodiment, the amino acid is Cys.

[0417] In some embodiments, the spacer comprises a hydrophilic bifunctional spacer. In a specific embodiment, the spacer comprises an amino poly(alkyloxy)carboxylate. In this regard, the spacer can comprise, for example, NH₂(CH₂CH₂O)ₙ(CH₂)ₘCOOH, wherein m is any integer from 1 to 6 and n is any integer from 2 to 12, such as, e.g., 8-amino-3,6-dioxaoctanoic acid, which is commercially available from Peptides International, Inc. (Louisville, Ky.).

[0418] In some embodiments in which the glucagon related peptide is a Class 1, Class 2, or Class 3 glucagon related peptide, the spacer is a hydrophilic bifunctional spacer. In certain embodiments, the hydrophilic bifunctional spacer attached to the Class 1, Class 2, or Class 3 glucagon related peptide comprises two or more reactive groups, e.g., an amine, a hydroxyl, a thiol, and a carboxyl group or any combinations thereof. In certain embodiments, the hydrophilic bifunctional spacer attached to the Class 1, Class 2, or Class 3 glucagon related peptide comprises a hydroxyl group and a carboxylate. In other embodiments, the hydrophilic bifunctional spacer attached to the Class 1, Class 2, or Class 3 glucagon related peptide comprises an amine group and a carboxylate. In other embodiments, the hydrophilic bifunctional spacer attached to the Class 1, Class 2, or Class 3 glucagon related peptide comprises a thiol group and a carboxylate.

[0419] In some embodiments, the spacer attached to the Class 1, Class 2, or Class 3 glucagon related peptide is a hydrophobic bifunctional spacer. In certain embodiments, the hydrophobic bifunctional spacer attached to the Class 1, Class 2, or Class 3 glucagon related peptide comprises two or more reactive groups, e.g., an amine, a hydroxyl, a thiol, and a carboxyl group or any combinations thereof. In certain embodiments, the hydrophobic bifunctional spacer attached to the Class 1, Class 2, or Class 3 glucagon related peptide comprises a hydroxyl group and a carboxylate. In other embodiments, the hydropholic bifunctional spacer attached to the Class 1, Class 2, or Class 3 glucagon related peptide comprises an amine group and a carboxylate. In other embodiments, the hydropholic bifunctional spacer attached to the Class 1, Class 2, or Class 3 glucagon related peptide comprises a thiol group and a carboxylate. Suitable hydrophobic bifunctional spacers comprising a carboxylate and a hydroxyl group or a thiol group are known in the art and include, for example, 8-hydroxyoctanoic acid and 8-mercaptooctanoic acid.

[0420] The spacer (e.g., amino acid, dipeptide, tripeptide, hydrophilic bifunctional spacer, or hydrophobic bifunctional spacer) in specific embodiments in which the glucagon related peptide is a Class 1, Class 2, or Class 3 glucagon related peptide is 3 to 10 atoms (e.g., 6 to 10 atoms, (e.g., 6, 7, 8, 9, or 10 atoms)) in length. In more specific embodiments, the spacer attached to the Class 1, Class 2, or Class 3 glucagon related peptide is about 3 to 10 atoms (e.g., 6 to 10 atoms) in length and the alkyl is a C12 to C18 alkyl group, e.g., C14 alkyl group, C16 alkyl group, such that the total length of the spacer and alkyl group is 14 to 28 atoms, e.g., about 14, 15, 16, 17, 18, 19, 20, 21, 22, 23, 24, 25, 26, 27, or 28 atoms. In some embodiments in which the glucagon related peptide is a Class 1, Class 2, or Class 3 glucagon related peptide, the length of the spacer and alkyl is 17 to 28 (e.g., 19 to 26, 19 to 21) atoms.

[0421] In accordance with certain foregoing embodiments in which the glucagon related peptide is a Class 1, Class 2, or Class 3 glucagon related peptide, the bifunctional spacer can be a synthetic or non-naturally occurring amino acid comprising an amino acid backbone that is 3 to 10 atoms in length (e.g., 6-amino hexanoic acid, 5-aminovaleric acid, 7-aminoheptanoic acid, and 8-aminooctanoic acid). Alternatively, the spacer attached to the Class 1, Class 2, or Class 3 glucagon related peptide can be a dipeptide or tripeptide spacer having a peptide backbone that is 3 to 10 atoms (e.g., 6 to 10 atoms) in length. The dipeptide or tripeptide spacer attached to the Class 1, Class 2, or Class 3 glucagon related peptide can be composed of naturally-occurring and/or non-naturally occurring amino acids, including, for example, any of the amino acids taught herein. In some embodiments in which the glucagon related peptide is a Class 1, Class 2, or Class 3 glucagon related peptide, the spacer comprises an overall negative charge, e.g., comprises one or two negatively charged amino acids. In some embodiments in which the glucagon related peptide is a Class 1, Class 2, or Class 3 glucagon related peptide, the dipeptide spacer is selected from the group consisting of: Ala-Ala, β-Ala-β-Ala, Leu-Leu, Pro-Pro, γ-aminobutyric acid-γ-aminobutyric acid, and γ-Glu-γ-Glu. In some embodiments, the dipeptide spacer is not γ-Glu-γ-Glu.

[0422] Suitable methods of peptide alkylation via amines, hydroxyls, and thiols are known in the art. For example, a Williamson ether synthesis can be used to form an ether linkage between the glucagon related peptide and the alkyl group. Also, a nucleophilic substitution reaction of the peptide with an alkyl halide can result in any of an ether, thioether, or amino linkage.

[0423] The alkyl group of the alkylated glucagon related peptide can be of any size, e.g., any length carbon chain, and can be linear or branched. In some embodiments of the invention, the alkyl group is a C4 to C30 alkyl. For example, the alkyl group can be any of a C4 alkyl, C6 alkyl, C8 alkyl, C10 alkyl, C12 alkyl, C14 alkyl, C16 alkyl, C18 alkyl, C20 alkyl, C22 alkyl, C24 alkyl, C26 alkyl, C28 alkyl, or a C30 alkyl. In some embodiments, the alkyl group is a C8 to C20 alkyl, e.g., a C14 alkyl or a C16 alkyl.

[0424] In some specific embodiments, the alkyl group comprises a steroid moiety of a bile acid, e.g., cholic acid, chenodeoxycholic acid, deoxycholic acid, lithocholic acid, taurocholic acid, glycocholic acid, and cholesterol acid.

[0425] In some embodiments of the invention in which the glucagon related peptide is a Class 1, Class 2, or Class 3 glucagon related peptide, the glucagon related peptide is modified to comprise an alkyl group by reacting a nucleophilic, long chain alkane with the glucagon related peptide, wherein the glucagon related peptide comprises a leaving group suitable for nucleophilic substitution. In specific aspects in which the glucagon related peptide is a Class 1, Class 2, or Class 3 glucagon related peptide, the nucleophilic group of the long chain alkane comprises an amine, hydroxyl, or thiol group (e.g. octadecylamine, tetradecanol, and hexadecanethiol). The leaving group of the Class 1, Class 2, or Class 3 glucagon related peptide can be part of a side chain of an amino acid or can be part of the peptide backbone. Suitable leaving groups include, for example, N-hydroxysuccinimide, halogens, and sulfonate esters.

[0426] In certain embodiments, the Class 1, Class 2, or Class 3 glucagon related peptide is modified to comprise an alkyl group by reacting the nucleophilic, long chain alkane with a spacer which is attached to the glucagon related peptide, wherein the spacer comprises the leaving group. In specific aspects in which the glucagon related peptide is a Class 1, Class 2, or Class 3 glucagon related peptide, the long chain alkane comprises an amine, hydroxyl, or thiol group. In certain embodiments in which the glucagon related peptide is a Class 1, Class 2, or Class 3 glucagon related peptide, the spacer comprising the leaving group can be any spacer discussed herein, e.g., amino acids, dipeptides, tripeptides, hydrophilic bifunctional spacers and hydrophobic bifunctional spacers further comprising a suitable leaving group.

[0427] With regard to these aspects of the invention in which the glucagon related peptide is a Class 1, Class 2, or Class 3 glucagon related peptide and in which a long chain alkane is alkylated by the glucagon related peptide or the spacer, the long chain alkane may be of any size and can comprise any length of carbon chain. The long chain alkane can be linear or branched. In certain aspects, the long chain alkane is a C4 to C30 alkane. For example, the long chain alkane can be any of a C4 alkane, C6 alkane, C8 alkane, C10 alkane, C12 alkane, C14 alkane, C16 alkane, C18 alkane, C20 alkane, C22 alkane, C24 alkane, C26 alkane, C28 alkane, or a C30 alkane. In some embodiments in which the glucagon related peptide is a Class 1, Class 2, or Class 3 glucagon related peptide, the long chain alkane comprises a C₈ to C20 alkane, e.g., a C14 alkane, C16 alkane, or a C18 alkane.

[0428] Also, in some embodiments in which the glucagon related peptide is a Class 1, Class 2, or Class 3 glucagon related peptide, alkylation can occur between the glucagon related peptide and a cholesterol moiety. For example, the hydroxyl group of cholesterol can displace a leaving group on the long chain alkane to form a cholesterol-glucagon peptide product.

[0429] The alkylated glucagon related peptides described herein can be further modified to comprise a hydrophilic moiety. In some specific embodiments the hydrophilic moiety can comprise a polyethylene glycol (PEG) chain. The incorporation of a hydrophilic moiety can be accomplished through any suitable means, such as any of the methods described herein. In this regard, the alkylated glucagon related peptide can comprise SEQ ID NO: 701, or a modified amino acid sequence thereof comprising one or more of the amino acid modifications described herein, in which at least one of the amino acids at position 10, 20, 24, and 29 (according to the amino acid numbering of wild type glucagon) comprise an alkyl group and at least one of the amino acids at position 16, 17, 21, 24, and 29, a position within a C-terminal extension or the C-terminal amino acid are modified to a Cys, Lys, Orn, homo-Cys, or Ac-Phe, and the side chain of the amino acid is covalently bonded to a hydrophilic moiety (e.g., PEG). In some embodiments, the alkyl group is attached to position 10 (according to the amino acid numbering of wild type glucagon), optionally via a spacer comprising Cys, Lys, Orn, homo-Cys, or Ac-Phe, and the hydrophilic moiety is incorporated at a Cys residue at position 24.

[0430] Alternatively, the alkylated glucagon related peptide can comprise a spacer, wherein the spacer is both alkylated and modified to comprise the hydrophilic moiety. Nonlimiting examples of suitable spacers include a spacer comprising one or more amino acids selected from the group consisting of Cys, Lys, Orn, homo-Cys, and Ac-Phe.

### Stabilization of the Alpha-Helix Structure

[0431] In some embodiments, an intramolecular bridge is formed between two amino acid side chains to stabilize the three dimensional structure of the carboxy terminal portion (e.g., amino acids 12-29 (according to the amino acid numbering of wild type glucagon)) of the glucagon related peptide. The two amino acid side chains can be linked to one another through hydrogen-bonding, ionic interactions, such as the formation of salt bridges, or by covalent bonds.

[0432] In some embodiments, the intramolecular bridge is formed between two amino acids that are 3 amino acids apart, e.g., amino acids at positions i and i+4, wherein i is any integer between 12 and 25 (e.g., 12, 13, 14, 15, 16, 17, 18, 19, 20, 21, 22, 23, 24, and 25) according to the amino acid numbering of wild type glucagon. More particularly, the side chains of the amino acid pairs 12 and 16, 16 and 20, 20 and 24 or 24 and 28 (amino acid pairs in which i=12, 16, 20, or 24) according to the amino acid numbering of wild type glucagon are linked to one another and thus stabilize the glucagon alpha helix. Alternatively, i can be 17.

[0433] In some specific embodiments, wherein the amino acids at positions i and i+4 are joined by an intramolecular bridge, the size of the linker is about 8 atoms, or about 7-9 atoms.

[0434] In other embodiments, the intramolecular bridge is formed between two amino acids that are two amino acids apart, e.g., amino acids at positions j and j+3, wherein j is any integer between 12 and 26 (e.g., 12, 13, 14, 15, 16, 17, 18, 19, 20, 21, 22, 23, 24, 25, and 26) according to the amino acid numbering of wild type glucagon. In some specific embodiments, j is 17.

[0435] In some specific embodiments, wherein amino acids at positions j and j+3 are joined by an intramolecular bridge, the size of the linker is about 6 atoms, or about 5 to 7 atoms.

[0436] In yet other embodiments, the intramolecular bridge is formed between two amino acids that are 6 amino acids apart, e.g., amino acids at positions k and k+7, wherein k is any integer between 12 and 22 (e.g., 12, 13, 14, 15, 16, 17, 18, 19, 20, 21, and 22) according to the amino acid numbering of wild type glucagon. In some specific embodiments, k is 12, 13, or 17. In an exemplary embodiment, k is 17.

[0437] Examples of amino acid pairings that are capable of covalently bonding to form a six-atom linking bridge include Orn and Asp, Glu and an amino acid of Formula I, wherein n is 2, and homoglutamic acid and an amino acid of Formula I, wherein n is 1, wherein Formula I is:

[chemical structure]

[0438] Examples of amino acid pairing that are capable of covalently bonding to form a seven-atom linking bridge include Orn-Glu (lactam ring); Lys-Asp (lactam); or Homoser-Homoglu (lactone). Examples of amino acid pairings that may form an eight-atom linker include Lys-Glu (lactam); Homolys-Asp (lactam); Orn-Homoglu (lactam); 4-aminoPhe-Asp (lactam); or Tyr-Asp (lactone). Examples of amino acid pairings that may form a nine-atom linker include Homolys-Glu (lactam); Lys-Homoglu (lactam); 4-aminoPhe-Glu (lactam); or Tyr-Glu (lactone). Any of the side chains on these amino acids may additionally be substituted with additional chemical groups, so long as the three-dimensional structure of the alpha-helix is not disrupted. One of ordinary skill in the art can envision alternative pairings or alternative amino acid analogs, including chemically modified derivatives, that would create a stabilizing structure of similar size and desired effect. For example, a homocysteine-homocysteine disulfide bridge is 6 atoms in length and may be further modified to provide the desired effect. Even without covalent linkage, the amino acid pairings described above or similar pairings that one of ordinary skill in the art can envision may also provide added stability to the alpha-helix through non-covalent bonds, for example, through formation of salt bridges or hydrogen-bonding interactions.

[0439] The size of a lactam ring can vary depending on the length of the amino acid side chains, and in some embodiments the lactam is formed by linking the side chains of a lysine amino acid to a glutamic acid side chain. Further exemplary embodiments (according to the amino acid numbering of wild type glucagon) include the following pairings, optionally with a lactam bridge: Glu at position 12 with Lys at position 16; native Lys at position 12 with Glu at position 16; Glu at position 16 with Lys at position 20; Lys at position 16 with Glu at position 20; Glu at position 20 with Lys at position 24; Lys at position 20 with Glu at position 24; Glu at position 24 with Lys at position 28; Lys at position 24 with Glu at position 28. Alternatively, the order of the amide bond in the lactam ring can be reversed (e.g., a lactam ring can be formed between the side chains of a Lys12 and a Glu16 or alternatively between a Glu 12 and a Lys16).

[0440] Intramolecular bridges other than a lactam bridge can be used to stabilize the alpha helix of the glucagon related peptides. In some embodiments, the intramolecular bridge is a hydrophobic bridge. In this instance, the intramolecular bridge optionally is between the side chains of two amino acids that are part of the hydrophobic face of the alpha helix of the glucagon related peptide. For example, one of the amino acids joined by the hydrophobic bridge can be the amino acid at position 10, 14, and 18 (according to the amino acid numbering of wild type glucagon).

[0441] In one specific aspect, olefin metathesis is used to cross-link one or two turns of the alpha helix of the glucagon related peptide using an all-hydrocarbon cross-linking system. The glucagon related peptide in this instance can comprise α-methylated amino acids bearing olefinic side chains of varying length and configured with either R or S stereochemistry at the and i+4 or i+7 positions. For example, the olefinic side can comprise (CH₂)ₙ, wherein n is any integer between 1 to 6. In some embodiments, n is 3 for a cross-link length of 8 atoms. Suitable methods of forming such intramolecular bridges are described in the art. See, for example, Schafmeister et al., J. Am. Chem. Soc. 122: 5891-5892 (2000) and Walensky et al., Science 305: 1466-1470 (2004). Alternatively, the glucagon peptide can comprise O-allyl Ser residues located on adjacent helical turns, which are bridged together via ruthenium-catalyzed ring closing metathesis. Such procedures of cross-linking are described in, for example, Blackwell et al., Angew, Chem., Int. Ed. 37: 3281-3284 (1998).

[0442] In another specific aspect, use of the unnatural thio-dialanine amino acid, lanthionine, which has been widely adopted as a peptidomimetic of cystine, is used to cross-link one turn of the alpha helix. Suitable methods of lanthionine-based cyclization are known in the art. See, for instance, Matteucci et al., Tetrahedron Letters 45: 1399-1401 (2004); Mayer et al., J. Peptide Res. 51: 432-436 (1998); Polinsky et al., J. Med. Chem. 35: 4185-4194 (1992); Osapay et al., J. Med. Chem. 40: 2241-2251 (1997); Fukase et al., Bull. Chem. Soc. Jpn. 65: 2227-2240 (1992); Harpp et al., J. Org. Chem. 36: 73-80 (1971); Goodman and Shao, Pure Appl. Chem. 68: 1303-1308 (1996); and Osapay and Goodman, J. Chem. Soc. Chem. Commun. 1599-1600 (1993).

[0443] In some embodiments, α, ω-diaminoalkane tethers, e.g., 1,4-diaminopropane and 1,5-diaminopentane) between two Glu residues at positions i and i+7 are used to stabilize the alpha helix of the glucagon peptide. Such tethers lead to the formation of a bridge 9-atoms or more in length, depending on the length of the diaminoalkane tether. Suitable methods of producing peptides cross-linked with such tethers are described in the art. See, for example, Phelan et al., J. Am. Chem. Soc. 119: 455-460 (1997).

[0444] In yet another embodiment of the invention, a disulfide bridge is used to cross-link one or two turns of the alpha helix of the glucagon related peptide. Alternatively, a modified disulfide bridge in which one or both sulfur atoms are replaced by a methylene group resulting in an isosteric macrocyclization is used to stabilize the alpha helix of the glucagon related peptide. Suitable methods of modifying peptides with disulfide bridges or sulfur-based cyclization are described in, for example, Jackson et al., J. Am. Chem. Soc. 113: 9391-9392 (1991) and Rudinger and Jost, Experientia 20: 570-571 (1964).

[0445] In yet another embodiment, the alpha helix of the glucagon related peptide is stabilized via the binding of metal atom by two His residues or a His and Cys pair positioned at i and i+4. The metal atom can be, for example, Ru(III), Cu(II), Zn(II), or Cd(II). Such methods of metal binding-based alpha helix stabilization are known in the art. See, for example, Andrews and Tabor, Tetrahedron 55: 11711-11743 (1999); Ghadiri et al., J. Am. Chem. Soc. 112: 1630-1632 (1990); and Ghadiri et al., J. Am. Chem. Soc. 119: 9063-9064 (1997).

[0446] The alpha helix of the glucagon related peptide can alternatively be stabilized through other means of peptide cyclizing, which means are reviewed in Davies, J. Peptide. Sci. 9: 471-501 (2003). The alpha helix can be stabilized via the formation of an amide bridge, thioether bridge, thioester bridge, urea bridge, carbamate bridge, sulfonamide bridge, and the like. For example, a thioester bridge can be formed between the C-terminus and the side chain of a Cys residue. Alternatively, a thioester can be formed via side chains of amino acids having a thiol (Cys) and a carboxylic acid (e.g., Asp, Glu). In another method, a cross-linking agent, such as a dicarboxylic acid, e.g. suberic acid (octanedioic acid), etc. can introduce a link between two functional groups of an amino acid side chain, such as a free amino, hydroxyl, thiol group, and combinations thereof.

[0447] In accordance with some embodiments, the alpha helix of the glucagon related peptide is stabilized through the incorporation of hydrophobic amino acids at positions i and i+4. For instance, i can be Tyr and i+4 can be either Val or Leu; i can be Phe and i+4 can be Cys or Met; I can be Cys and i+4 can be Met; or i can be Phe and i+4 can be Ile. It should be understood that, for purposes herein, the above amino acid pairings can be reversed, such that the indicated amino acid at position i could alternatively be located at i+4, while the i+4 amino acid can be located at the i position.

[0448] In accordance with other embodiments of the invention, wherein glucagon related peptide is a peptide having glucagon agonist activity, GIP agonist activity, glucagon antagonist and GLP-1 activity, the alpha helix is stabilized through incorporation (either by amino acid substitution or insertion) of one or more alpha helix-stabilizing amino acids at the C-terminal portion of the glucagon related peptide (around amino acids 12-29 according to the numbering of the amino acid numbering of wild type glucagon). In a specific embodiment, the alpha helix-stabilizing amino acid is an α,α-disubstituted amino acid, including, but not limited to any of amino iso-butyric acid (AIB), an amino acid disubstituted with the same or a different group selected from methyl, ethyl, propyl, and n-butyl, or with a cyclooctane or cycloheptane (e.g., 1-aminocyclooctane-1-carboxylic acid). In some embodiments, one, two, three, four or more of positions 16, 17, 18, 19, 20, 21, 24 or 29 of the glucagon related peptide is substituted with an α,α-disubstituted amino acid. In a specific embodiment, one, two, three or all of positions 16, 20, 21, and 24 are substituted with AIB.

[0449] Conjugates

[0450] The present disclosure also encompasses conjugates in which a glucagon related peptide (e.g. a Class 1 glucagon related peptide, Class 2 glucagon related peptide, Class 3 glucagon related peptide, Class 4 glucagon related peptide, or Class 5 glucagon related peptide), is linked, optionally via covalent bonding and optionally via a linker, to a conjugate moiety. Linkage can be accomplished by covalent chemical bonds, physical forces such electrostatic, hydrogen, ionic, van der Waals, or hydrophobic or hydrophilic interactions. A variety of non-covalent coupling systems may be used, including biotin-avidin, ligand/receptor, enzyme/substrate, nucleic acid/nucleic acid binding protein, lipid/lipid binding protein, cellular adhesion molecule partners; or any binding partners or fragments thereof which have affinity for each other.

[0451] The glucagon related peptide can be linked to conjugate moieties via direct covalent linkage by reacting targeted amino acid residues of the peptide with an organic derivatizing agent that is capable of reacting with selected side chains or the N- or C-terminal residues of these targeted amino acids. Reactive groups on the peptide or conjugate moiety include, e.g., an aldehyde, amino, ester, thiol, α-haloacetyl, maleimido or hydrazino group. Derivatizing agents include, for example, maleimidobenzoyl sulfosuccinimide ester (conjugation through cysteine residues), N-hydroxysuccinimide (through lysine residues), glutaraldehyde, succinic anhydride or other agents known in the art. Alternatively, the conjugate moieties can be linked to the peptide indirectly through intermediate carriers, such as polysaccharide or polypeptide carriers. Examples of polysaccharide carriers include aminodextran. Examples of suitable polypeptide carriers include polylysine, polyglutamic acid, polyaspartic acid, co-polymers thereof, and mixed polymers of these amino acids and others, e.g., serines, to confer desirable solubility properties on the resultant loaded carrier.

[0452] Cysteinyl residues most commonly are reacted with α-haloacetates (and corresponding amines), such as chloroacetic acid or chloroacetamide, to give carboxymethyl or carboxyamidomethyl derivatives. Cysteinyl residues also are derivatized by reaction with bromotrifluoroacetone, alpha-bromo-β-(5-imidozoyl)propionic acid, chloroacetyl phosphate, N-alkylmaleimides, 3-nitro-2-pyridyl disulfide, methyl 2-pyridyl disulfide, p-chloromercuribenzoate, 2-chloromercuri-4-nitrophenol, or chloro-7-nitrobenzo-2-oxa-1,3-diazole.

[0453] Histidyl residues are derivatized by reaction with diethylpyrocarbonate at pH 5.5-7.0 because this agent is relatively specific for the histidyl side chain. Para-bromophenacyl bromide also is useful; the reaction is preferably performed in 0.1 M sodium cacodylate at pH 6.0.

[0454] Lysinyl and amino-terminal residues are reacted with succinic or other carboxylic acid anhydrides. Derivatization with these agents has the effect of reversing the charge of the lysinyl residues. Other suitable reagents for derivatizing alpha-amino-containing residues include imidoesters such as methyl picolinimidate, pyridoxal phosphate, pyridoxal, chloroborohydride, trinitrobenzenesulfonic acid, O-methylisourea, 2,4-pentanedione, and transaminase-catalyzed reaction with glyoxylate.

[0455] Arginyl residues are modified by reaction with one or several conventional reagents, among them phenylglyoxal, 2,3-butanedione, 1,2-cyclohexanedione, and ninhydrin. Derivatization of arginine residues requires that the reaction be performed in alkaline conditions because of the high pKₐ of the guanidine functional group. Furthermore, these reagents may react with the groups of lysine as well as the arginine epsilon-amino group.

[0456] The specific modification of tyrosyl residues may be made, with particular interest in introducing spectral labels into tyrosyl residues by reaction with aromatic diazonium compounds or tetranitromethane. Most commonly, N-acetylimidizole and tetranitromethane are used to form O-acetyl tyrosyl species and 3-nitro derivatives, respectively.

[0457] Carboxyl side groups (aspartyl or glutamyl) are selectively modified by reaction with carbodiimides (R—N═C═N—R′), where R and R′ are different alkyl groups, such as 1-cyclohexyl-3-(2-morpholinyl-4-ethyl) carbodiimide or 1-ethyl-3-(4-azonia-4,4-dimethylpentyl) carbodiimide. Furthermore, aspartyl and glutamyl residues are converted to asparaginyl and glutaminyl residues by reaction with ammonium ions.

[0458] Other modifications include hydroxylation of proline and lysine, phosphorylation of hydroxyl groups of seryl or threonyl residues, methylation of the alpha-amino groups of lysine, arginine, and histidine side chains (T. E. Creighton, Proteins: Structure and Molecular Properties, W.H. Freeman & Co., San Francisco, pp. 79-86 (1983)), deamidation of asparagine or glutamine, acetylation of the N-terminal amine, and/or amidation or esterification of the C-terminal carboxylic acid group.

[0459] Another type of covalent modification involves chemically or enzymatically coupling glycosides to the peptide. Sugar(s) may be attached to (a) arginine and histidine, (b) free carboxyl groups, (c) free sulfhydryl groups such as those of cysteine, (d) free hydroxyl groups such as those of serine, threonine, or hydroxyproline, (e) aromatic residues such as those of tyrosine, or tryptophan, or (f) the amide group of glutamine. These methods are described in WO87/05330 published 11 Sep. 1987, and in Aplin and Wriston, CRC Crit. Rev. Biochem., pp. 259-306 (1981).

[0460] Exemplary conjugate moieties that can be linked to any of the glucagon related peptides described herein include but are not limited to a heterologous peptide or polypeptide (including for example, a plasma protein), a targeting agent, an immunoglobulin or portion thereof (e.g. variable region, CDR, or Fc region), a diagnostic label such as a radioisotope, fluorophore or enzymatic label, a polymer including water soluble polymers, or other therapeutic or diagnostic agents. In some embodiments a conjugate is provided comprising a glucagon related peptide of the present invention and a plasma protein, wherein the plasma protein is selected from the group consisting of albumin, transferin, fibrinogen and globulins. In some embodiments the plasma protein moiety of the conjugate is albumin or transferin. In some embodiments, the linker comprises a chain of atoms from 1 to about 60, or 1 to 30 atoms or longer, 2 to 5 atoms, 2 to 10 atoms, 5 to 10 atoms, or 10 to 20 atoms long. In some embodiments, the chain atoms are all carbon atoms. In some embodiments, the chain atoms in the backbone of the linker are selected from the group consisting of C, O, N, and S. Chain atoms and linkers may be selected according to their expected solubility (hydrophilicity) so as to provide a more soluble conjugate. In some embodiments, the linker provides a functional group that is subject to cleavage by an enzyme or other catalyst or hydrolytic conditions found in the target tissue or organ or cell. In some embodiments, the length of the linker is long enough to reduce the potential for steric hindrance. If the linker is a covalent bond or a peptidyl bond and the conjugate is a polypeptide, the entire conjugate can be a fusion protein. Such peptidyl linkers may be any length. Exemplary linkers are from about 1 to 50 amino acids in length, 5 to 50, 3 to 5, 5 to 10, 5 to 15, or 10 to 30 amino acids in length. Such fusion proteins may alternatively be produced by recombinant genetic engineering methods known to one of ordinary skill in the art.

[0461] As noted above, in some embodiments, the glucagon related peptides are conjugated, e.g., fused to an immunoglobulin or portion thereof (e.g. variable region, CDR, or Fc region). Known types of immunoglobulins (Ig) include IgG, IgA, IgE, IgD or IgM. The Fc region is a C-terminal region of an Ig heavy chain, which is responsible for binding to Fc receptors that carry out activities such as recycling (which results in prolonged half-life), antibody dependent cell-mediated cytotoxicity (ADCC), and complement dependent cytotoxicity (CDC).

[0462] For example, according to some definitions the human IgG heavy chain Fc region stretches from Cys226 to the C-terminus of the heavy chain. The “hinge region” generally extends from Glu216 to Pro230 of human IgG1 (hinge regions of other IgG isotypes may be aligned with the IgG1 sequence by aligning the cysteines involved in cysteine bonding). The Fc region of an IgG includes two constant domains, CH2 and CH3. The CH2 domain of a human IgG Fc region usually extends from amino acids 231 to amino acid 341. The CH3 domain of a human IgG Fc region usually extends from amino acids 342 to 447. References made to amino acid numbering of immunoglobulins or immunoglobulin fragments, or regions, are all based on Kabat et al. 1991, Sequences of Proteins of Immunological Interest, U.S. Department of Public Health, Bethesda, Md. In a related embodiment, the Fc region may comprise one or more native or modified constant regions from an immunoglobulin heavy chain, other than CH1, for example, the CH2 and CH3 regions of IgG and IgA, or the CH3 and CH4 regions of IgE.

[0463] Suitable conjugate moieties include portions of immunoglobulin sequence that include the FcRn binding site. FcRn, a salvage receptor, is responsible for recycling immunoglobulins and returning them to circulation in blood. The region of the Fc portion of IgG that binds to the FcRn receptor has been described based on X-ray crystallography (Burmeister et al. 1994, Nature 372:379). The major contact area of the Fc with the FcRn is near the junction of the CH2 and CH3 domains. Fc-FcRn contacts are all within a single Ig heavy chain. The major contact sites include amino acid residues 248, 250-257, 272, 285, 288, 290-291, 308-311, and 314 of the CH2 domain and amino acid residues 385-387, 428, and 433-436 of the CH3 domain.

[0464] Some conjugate moieties may or may not include FcγR binding site(s). FcγR are responsible for ADCC and CDC. Examples of positions within the Fc region that make a direct contact with FcγR are amino acids 234-239 (lower hinge region), amino acids 265-269 (B/C loop), amino acids 297-299 (C′/E loop), and amino acids 327-332 (F/G) loop (Sondermann et al., Nature 406: 267-273, 2000). The lower hinge region of IgE has also been implicated in the FcRI binding (Henry, et al., Biochemistry 36, 15568-15578, 1997). Residues involved in IgA receptor binding are described in Lewis et al., (J. Immunol. 175:6694-701, 2005). Amino acid residues involved in IgE receptor binding are described in Sayers et al. (J Biol. Chem. 279(34):35320-5, 2004).

[0465] Amino acid modifications may be made to the Fc region of an immunoglobulin. Such variant Fc regions comprise at least one amino acid modification in the CH3 domain of the Fc region (residues 342-447) and/or at least one amino acid modification in the CH2 domain of the Fc region (residues 231-341). Mutations believed to impart an increased affinity for FcRn include T256A, T307A, E380A, and N434A (Shields et al. 2001, J. Biol. Chem. 276:6591). Other mutations may reduce binding of the Fc region to FcγRI, FcγRIIA, FcγRIIB, and/or FcγRIIIA without significantly reducing affinity for FcRn. For example, substitution of the Asn at position 297 of the Fc region with Ala or another amino acid removes a highly conserved N-glycosylation site and may result in reduced immunogenicity with concomitant prolonged half-life of the Fc region, as well as reduced binding to FcγRs (Routledge et al. 1995, Transplantation 60:847; Friend et al. 1999, Transplantation 68:1632; Shields et al. 1995, J. Biol. Chem. 276:6591). Amino acid modifications at positions 233-236 of IgG1 have been made that reduce binding to FcγRs (Ward and Ghetie 1995, Therapeutic Immunology 2:77 and Armour et al. 1999, Eur. J. Immunol. 29:2613). Some exemplary amino acid substitutions are described in U.S. Pat. Nos. 7,355,008 and 7,381,408, each incorporated by reference herein in its entirety.

[0466] rPEG

[0467] In some embodiments, the conjugate of the invention comprises a glucagon superfamily peptide, including glucagon-related peptides, osteocalcin, as well as analogs, derivatives and conjugates of the foregoing, fused to an accessory peptide which is capable of forming an extended conformation similar to chemical PEG (e.g., a recombinant PEG (rPEG) molecule), such as those described in International Patent Application Publication No. WO2009/023270 and U.S. Patent Application Publication No. US2008/0286808. The rPEG molecule is not polyethylene glycol. The rPEG molecule in some aspects is a polypeptide comprising one or more of glycine, serine, glutamic acid, aspartic acid, alanine, or proline. In some aspects, the rPEG is a homopolymer, e.g., poly-glycine, poly-serine, poly-glutamic acid, poly-aspartic acid, poly-alanine, or poly-proline. In other embodiments, the rPEG comprises two types of amino acids repeated, e.g., poly(Gly-Ser), poly(Gly-Glu), poly(Gly-Ala), poly(Gly-Asp), poly(Gly-Pro), poly(Ser-Glu), etc. In some aspects, the rPEG comprises three different types of amino acids, e.g., poly(Gly-Ser-Glu). In specific aspects, the rPEG increases the half-life of the glucagon superfamily peptide, or osteocalcin. In some aspects, the rPEG comprises a net positive or net negative charge. The rPEG in some aspects lacks secondary structure. In some embodiments, the rPEG is greater than or equal to 10 amino acids in length and in some embodiments is about 40 to about 50 amino acids in length. The accessory peptide in some aspects is fused to the N- or C-terminus of the peptide of the invention through a peptide bond or a proteinase cleavage site, or is inserted into the loops of the peptide of the invention. The rPEG in some aspects comprises an affinity tag or is linked to a PEG that is greater than 5 kDa. In some embodiments, the rPEG confers the peptide of the invention with an increased hydrodynamic radius, serum half-life, protease resistance, or solubility and in some aspects confers the peptide with decreased immunogenicity.

[0468] Fusion Peptides—C-Terminal Extension

[0469] In certain embodiments a glucagon related peptide may comprise a C-terminus or a C-terminal amino acid sequence including but not limited to: COOH, CONH₂, GPSSGAPPPS (SEQ ID NO: 710), GPSSGAPPPS-CONH₂ (SEQ ID NO: 711), a oxyntomodulin carboxy terminal extension, KRNRNNIA (SEQ ID NO: 714) or KGKKNDWKHNITQ (SEQ ID NO: 713). For example, the terminal ten amino acids of Exendin-4 (i.e. the sequence of SEQ ID NO: 710 (GPSSGAPPPS)) are linked to the carboxy terminus of the Class 1 glucagon related peptide, Class 2 glucagon related peptide, Class 3 glucagon related peptide, Class 4 glucagon related peptide, or Class 5 glucagon related peptide of the present disclosure.

[0470] Another compound that induces weight loss is oxyntomodulin, a naturally occurring digestive hormone found in the small intestine (see Diabetes 2005; 54:2390-2395). Oxyntomodulin is a 37 amino acid peptide (SEQ ID NO: 706) that contains the 29 amino acid sequence of glucagon followed by an 8 amino acid carboxy terminal extension of SEQ ID NO: 714 (KRNRNNIA). Accordingly, in some embodiments prodrug derivatives of glucagon related peptides are provided that further comprise the carboxy terminal extension of the sequence of SEQ ID NO: 714 or a four amino acid extension having the sequence KRNR.

[0471] Glucagon Modification at Position 3

[0472] Glucagon related peptides of Classes 1 to 3 described herein may be modified at position 3 (according to the amino acid numbering of wild type glucagon) to maintain or increase activity at the glucagon receptor.

[0473] In some embodiments in which the glucagon related peptide is a Class 1, Class 2, or Class 3 glucagon related peptide, maintained or enhanced activity at the glucagon receptor may be achieved by modifying the Gln at position 3 with a glutamine analog. For example, a Class 1, Class 2, or Class 3 glucagon related peptide comprising a glutamine analog at position 3 may exhibit about 5%, about 10%, about 20%, about 50%, or about 85% or greater the activity of native glucagon (SEQ ID NO: 701) at the glucagon receptor. In some embodiments a Class 1, Class 2, or Class 3 glucagon related peptide comprising a glutamine analog at position 3 may exhibit about 20%, about 50%, about 75%, about 100%, about 200% or about 500% or greater the activity of a corresponding glucagon peptide having the same amino acid sequence as the peptide comprising the glutamine analog, except for the modified amino acid at position 3 at the glucagon receptor. In some embodiments, a Class 1, Class 2, or Class 3 glucagon related peptide comprising a glutamine analog at position 3 exhibits enhanced activity at the glucagon receptor, but the enhanced activity is no more than 1000%, 10,000%, 100,000%, or 1,000,000% of the activity of native glucagon or of a corresponding glucagon related peptide having the same amino acid sequence as the peptide comprising the glutamine analog, except for the modified amino acid at position 3.

[0474] In some embodiments, the glutamine analog is a naturally occurring or a non-naturally occurring amino acid comprising a side chain of Structure I, II or III:

[chemical structure]

[0475] wherein R¹ is C₀₋₃ alkyl or C₀₋₃ heteroalkyl; R² is NHR⁴ or C₁₋₃ alkyl; R³ is C₁₋₃ alkyl; R⁴ is H or C₁₋₃ alkyl; X is NH, O, or S; and Y is NHR⁴, SR³, or OR³. In some embodiments, X is NH or Y is NHR⁴. In some embodiments, R¹ is C₀₋₂ alkyl or C₁ heteroalkyl. In some embodiments, R² is NHR⁴ or C₁ alkyl. In some embodiments, R⁴ is H or C¹ alkyl. In exemplary embodiments in which the glucagon related peptide is a Class 1, Class 2, or Class 3 glucagon related peptide, an amino acid comprising a side chain of Structure I is provided where, R¹ is CH—S, X is NH, and R² is CH₃ (acetamidomethyl-cysteine, C(Acm)); R¹ is CH₂, X is NH, and R² is CH₃ (acetyldiaminobutanoic acid, Dab(Ac)); R¹ is C₀ alkyl, X is NH, R² is NHR⁴, and R⁴ is H (carbamoyldiaminopropanoic acid, Dap(urea)); or R¹ is CH₂—CH₂, X is NH, and R² is CH₃ (acetylornithine, Orn(Ac)). In exemplary embodiments an amino acid comprising a side chain of Structure II is provided where, R¹ is CH₂, Y is NHR⁴, and R⁴ is CH₃ (methylglutamine, Q(Me)); In exemplary embodiments an amino acid comprising a side chain of Structure IIII is provided where, R¹ is CH₂ and R⁴ is H (methionine-sulfoxide, M(O)); In specific embodiments, the amino acid at position 3 is substituted with Dab(Ac).

[0476] Dimers

[0477] With regard to the Class 1, Class 2, and Class 3 glucagon related peptides, the glucagon related peptide may be part of a dimer, trimer or higher order multimer comprising at least two, three, or more peptides bound via a linker, wherein at least one or both peptides is a glucagon related peptide. The dimer may be a homodimer or heterodimer. In some embodiments, the linker is selected from the group consisting of a bifunctional thiol crosslinker and a bi-functional amine crosslinker. In certain embodiments, the linker is PEG, e.g., a 5 kDa PEG, 20 kDa PEG. In some embodiments, the linker is a disulfide bond. For example, each monomer of the dimer may comprise a Cys residue (e.g., a terminal or internally positioned Cys) and the sulfur atom of each Cys residue participates in the formation of the disulfide bond. In some aspects of the invention, the monomers are connected via terminal amino acids (e.g., N-terminal or C-terminal), via internal amino acids, or via a terminal amino acid of at least one monomer and an internal amino acid of at least one other monomer. In specific aspects, the monomers are not connected via an N-terminal amino acid. In some aspects, the monomers of the multimer are attached together in a “tail-to-tail” orientation in which the C-terminal amino acids of each monomer are attached together. A conjugate moiety may be covalently linked to any of the glucagon related peptides described herein, including a dimer, trimer or higher order multimer.

[0478] Methods for Making Glucagon Related Peptides

[0479] The glucagon related peptides (and prodrugs) of this disclosed herein may be prepared by standard synthetic methods, recombinant DNA techniques, or any other methods of preparing peptides and fusion proteins. Although certain non-natural amino acids cannot be expressed by standard recombinant DNA techniques, techniques for their preparation are known in the art. Compounds of this invention that encompass non-peptide portions may be synthesized by standard organic chemistry reactions, in addition to standard peptide chemistry reactions when applicable.

[0480] Classes of glucagon related peptides are described in detail below. With respect to each of the sections of disclosure concerning class 1, 2, 3, 4 and 5 glucagon related peptides modifications are described with respect to the glucagon related peptide portion (Q) of a prodrug compound detailed above. Thus, structural elements described with regard to a class of glucagon related peptides are structural elements of Q which is then further modified to generate a prodrug compound as described above.

### Class 1 Glucagon Related Peptides

[0481] In certain embodiments, the glucagon related peptide is a Class 1 glucagon related peptide, which is described herein and in International Patent Application No. PCT US2009/47437 (filed on Jun. 16, 2009), International Patent Application Publication No. WO 2008/086086, published on Jul. 17, 2008, and U.S. Provisional Application No. 61/090,415, the contents of which are incorporated by reference in their entirety.

[0482] The biological sequences referenced in the following section (SEQ ID NOs: 801-915) relating to Class 1 glucagon related peptides correspond to SEQ ID NOs: 1-115 in International Patent Application No. PCT US2009/47437.

[0483] Activity

[0484] Class 1 glucagon peptides retain glucagon receptor activity relative to the native glucagon peptide (SEQ ID NO: 801). For example, the glucagon peptide can retain at least 10%, 20%, 30%, 40%, 50%, 60%, 70%, 75% activity, 80% activity, 85% activity, or 90% of the activity of native glucagon (calculated as the inverse ratio of EC50s for the glucagon peptide vs. glucagon, e.g., as measured by cAMP production using the assay generally described in Example 5). In some embodiments, the Class 1 glucagon related peptides have the same or greater activity (used synonymously with the term “potency” herein) than glucagon. In some embodiments, the glucagon peptides described herein exhibit no more than about 100%, 1000%, 10,000%, 100,000%, or 1,000,000% of the activity of native glucagon peptide.

[0485] Any of the Class 1 glucagon related peptides described herein may exhibit an EC50 at the human glucagon receptor of about 100 nM, 75 nM, 50 nM, 40 nM, 30 nM, 20 nM, 10 nM, 5 nM, 1 nM or less when tested for cAMP induction in HEK293 cells over-expressing glucagon receptor, e.g. using the assay of Example 5. Typically pegylated peptides will exhibit a higher EC50 compared to the unpegylated peptide. For example, the Class 1 glucagon related peptides described herein, when unpegylated, may exhibit activity at the glucagon receptor which is at least 20% (e.g., at least 30%, at least 40%, at least 50%, at least 60%, at least 75%, at least 80%, at least 90% at least 95%, at least 98%, at least 99%, 100%, 150%, 200%, 400%, 500% or more) of the activity of native glucagon (SEQ ID NO: 801) at the glucagon receptor. In certain embodiments, the Class 1 glucagon related peptides described herein exhibit the indicated % activity of native glucagon at the glucagon receptor, when lacking a hydrophilic moiety, but exhibit a decreased % activity of native glucagon at the glucagon receptor, when comprising a hydrophilic moiety. For example, the Class 1 glucagon related peptides described herein, when pegylated, may exhibit activity at the glucagon receptor which is at least 2% (e.g. at least 3%, at least 4%, at least 5%, at least 6%, at least 7%, at least 8%, at least 9%, or at least 10% of the activity of native glucagon. In some embodiments, the Class 1 glucagon related peptides described herein may exhibit any of the above indicated activities but no more than 1000%, 10,000%, 100,000%, or 1,000,000% of the activity of native glucagon at the glucagon receptor.

[0486] In some embodiments, the Class 1 glucagon related peptides exhibit less than about 5%, 4%, 3%, 2% or 1% of the activity of native GLP-1 at the GLP-1 receptor and/or a greater than about 5-fold, 10-fold, or 15-fold selectivity for glucagon receptor compared to GLP-1 receptor. For example, in some embodiments, the Class 1 glucagon related peptides exhibit less than 5% of the activity of native GLP-1 at the GLP-1 receptor and exhibit a greater than 5-fold selectivity for glucagon receptor compared to GLP-1 receptor.

### Improved Solubility

[0487] Native glucagon exhibits poor solubility in aqueous solution, particularly at physiological pH, with a tendency to aggregate and precipitate over time. In contrast, the Class 1 glucagon related peptides in some embodiments exhibit at least 2-fold, 5-fold, or even higher solubility compared to native glucagon at a pH between 6 and 8, or between 6 and 9, for example, at pH 7 after 24 hours at 25° C.

[0488] Accordingly, in some embodiments, a Class 1 glucagon related peptide has been modified relative to the wild type peptide of His-Ser-Gln-Gly-Thr-Phe-Thr-Ser-Asp-Tyr-Ser-Lys-Tyr-Leu-Asp-Ser-Arg-Arg-Ala-Gln-Asp-Phe-Val-Gln-Trp-Leu-Met-Asn-Thr (SEQ ID NO: 801) to improve the peptide's solubility in aqueous solutions, particularly at a pH ranging from about 5.5 to about 8.0, while retaining the native peptide's biological activity.

[0489] For example, the solubility of any of the Class 1 glucagon related peptides described herein can be further improved by attaching a hydrophilic moiety to the peptide. Introduction of such groups also increases duration of action, e.g. as measured by a prolonged half-life in circulation. Hydrophilic moieties are further described herein.

[0490] Modification with Charged Residues

[0491] In some embodiments, solubility is improved by adding charge to the Class 1 glucagon related peptide by the substitution of native non-charged amino acids with charged amino acids selected from the group consisting of lysine, arginine, histidine, aspartic acid and glutamic acid, or by the addition of charged amino acids to the amino or carboxy terminus of the peptide.

[0492] In accordance with some embodiments, the Class 1 glucagon related peptide has improved solubility due to the fact that the peptide is modified by amino acid substitutions and/or additions that introduce a charged amino acid into the C-terminal portion of the peptide, and in some embodiments at a position C-terminal to position 27 of SEQ ID NO: 801. Optionally, one, two or three charged amino acids may be introduced within the C-terminal portion, and in some embodiments C-terminal to position 27. In accordance with some embodiments, the native amino acid(s) at positions 28 and/or 29 are substituted with a charged amino acid, and/or one to three charged amino acids are added to the C-terminus of the peptide, e.g. after position 27, 28 or 29. In exemplary embodiments, one, two, three or all of the charged amino acids are negatively charged. In other embodiments, one, two, three or all of the charged amino acids are positively charged.

[0493] In specific exemplary embodiments, the Class 1 glucagon related peptide may comprise any one or two of the following modifications: substitution of N28 with E; substitution of N28 with D; substitution of T29 with D; substitution of T29 with E; insertion of E after position 27, 28 or 29; insertion of D after position 27, 28 or 29. For example, D28E29, E28E29, E29E30, E28E30, D28E30.

[0494] In accordance with one exemplary embodiment, the Class 1 glucagon related peptide comprises an amino acid sequence of SEQ ID NO: 811, or an analog thereof that contains 1 to 3 further amino acid modifications (described herein in reference to glucagon agonists) relative to native glucagon, or a glucagon agonist analog thereof. SEQ ID NO: 811 represents a modified Class 1 glucagon related peptide, wherein the asparagine residue at position 28 of the native protein has been substituted with an aspartic acid. In another exemplary embodiment the Class 1 glucagon related peptide comprises an amino acid sequence of SEQ ID NO: 838, wherein the asparagine residue at position 28 of the native protein has been substituted with glutamic acid. Other exemplary embodiments include Class 1 glucagon related peptides of SEQ ID NOS: 824, 825, 826, 833, 835, 836 and 837.

[0495] Substituting the normally occurring amino acid at position 28 and/or 29 with charged amino acids, and/or the addition of one to two charged amino acids at the carboxy terminus of the Class 1 glucagon related peptide, enhances the solubility and stability of the glucagon peptides in aqueous solutions at physiologically relevant pHs (i.e., a pH of about 6.5 to about 7.5) by at least 5-fold and by as much as 30-fold. Accordingly, Class 1 glucagon peptides of some embodiments retain glucagon activity and exhibit at least 2-fold, 5-fold, 10-fold, 15-fold, 25-fold, 30-fold or greater solubility relative to native glucagon at a given pH between about 5.5 and 8, e.g., pH 7, when measured after 24 hours at 25° C.

[0496] Additional modifications, e.g. conservative substitutions, which modifications are further described herein, may be made to the Class 1 glucagon related peptide that still allow it to retain glucagon activity.

### Improved Stability

[0497] Any of the Class 1 glucagon peptides may additionally exhibit improved stability and/or reduced degradation, for example, retaining at least 95% of the original peptide after 24 hours at 25° C. Any of the Class 1 glucagon related peptides disclosed herein may additionally exhibit improved stability at a pH within the range of 5.5 to 8, for example, retaining at least 75%, 80%, 90%, 95%, 96%, 97%, 98% or 99% of the original peptide after 24 hours at 25° C. In some embodiments, the Class 1 glucagon related peptides of the invention exhibit improved stability, such that at least 75% (e.g., at least 80%, at least 85%, at least 90%, at least 95%, more than 95%, up to 100%) of a concentration of the peptide or less than about 25% (e.g., less than 20%, less than 15%, less than 10%, less than 5%, 4%, 3%, 2%, 1%, down to 0%) of degraded peptide is detectable at 280 nm by an ultraviolet (UV) detector after about 1 or more weeks (e.g., about 2 weeks, about 4 weeks, about 1 month, about two months, about four months, about six months, about eight months, about ten months, about twelve months) in solution at a temperature of at least 20° C. (e.g., 21° C., 22° C., 23° C., 24° C., 25° C., 26° C., at least 27.5° C., at least 30° C., at least 35° C., at least 40° C., at least 50° C.) and less than 100° C., less than 85° C., less than 75° C., or less than 70° C. The Class 1 glucagon related peptides may include additional modifications that alter its pharmaceutical properties, e.g. increased potency, prolonged half-life in circulation, increased shelf-life, reduced precipitation or aggregation, and/or reduced degradation, e.g., reduced occurrence of cleavage or chemical modification after storage.

[0498] In yet further exemplary embodiments, any of the foregoing Class 1 glucagon related peptides can be further modified to improve stability by modifying the amino acid at position 15 of SEQ ID NO: 801 to reduce degradation of the peptide over time, especially in acidic or alkaline buffers. In exemplary embodiments, Asp at position 15 is substituted with a Glu, homo-Glu, cysteic acid, or homo-cysteic acid.

[0499] Alternatively, any of the Class 1 glucagon related peptides described herein can be further modified to improve stability by modifying the amino acid at position 16 of SEQ ID NO: 801. In exemplary embodiments, Ser at position 16 is substituted with Thr or AIB, or any of the amino acids substitutions described herein with regard to Class 1 glucagon related peptides which enhance potency at the glucagon receptor. Such modifications reduce cleavage of the peptide bond between Asp15-Ser16.

[0500] In some embodiments, any of the Class 1 glucagon related peptides described herein can be further modified to reduce degradation at various amino acid positions by modifying any one, two, three, or all four of positions 20, 21, 24, or 27. Exemplary embodiments include substitution of Gln at position 20 with Ser, Thr, Ala or AIB, substitution of Asp at position 21 with Glu, substitution of Gln at position 24 with Ala or AIB, substitution of Met at position 27 with Leu or Nle. Removal or substitution of methionine reduces degradation due to oxidation of the methionine. Removal or substitution of Gln or Asn reduces degradation due to deamidation of Gln or Asn. Removal or substitution of Asp reduces degradation that occurs through dehydration of Asp to form a cyclic succinimide intermediate followed by isomerization to iso-aspartate.

[0501] Enhanced Potency

[0502] In accordance with another embodiment, Class 1 glucagon related peptides are provided that have enhanced potency at the glucagon receptor, wherein the peptides comprise an amino acid modification at position 16 of native glucagon (SEQ ID NO: 801). By way of nonlimiting example, such enhanced potency can be provided by substituting the naturally occurring serine at position 16 with glutamic acid or with another negatively charged amino acid having a side chain with a length of 4 atoms, or alternatively with any one of glutamine, homoglutamic acid, or homocysteic acid, or a charged amino acid having a side chain containing at least one heteroatom, (e.g. N, O, S, P) and with a side chain length of about 4 (or 3-5) atoms. Substitution of serine at position 16 with glutamic acid enhances glucagon activity at least 2-fold, 4-fold, 5-fold and up to 10-fold greater at the glucagon receptor. In some embodiments, the Class 1 glucagon related peptide retains selectivity for the glucagon receptor relative to the GLP-1 receptors, e.g., at least 5-fold, 10-fold, or 15-fold selectivity.

[0503] DPP-IV Resistance

[0504] In some embodiments, the Class 1 glucagon peptides disclosed herein are further modified at position 1 or 2 to reduce susceptibility to cleavage by dipeptidyl peptidase IV. More particularly, in some embodiments, position 1 and/or position 2 of the Class 1 glucagon related peptide is substituted with the DPP-IV resistant amino acid(s) described herein. In some embodiments, position 2 of the analog peptide is substituted with an amino isobutyric acid. In some embodiments, position 2 of the analog peptide is substituted with an amino acid selected from the group consisting of D-serine, D-alanine, glycine, N-methyl serine, and ε-amino butyric acid. In another embodiment, position 2 of the Class 1 glucagon related peptide is substituted with an amino acid selected from the group consisting of D-serine, glycine, and aminoisobutyric acid. In some embodiments, the amino acid at position 2 is not D-serine.

[0505] Reduction in glucagon activity upon modification of the amino acids at position 1 and/or position 2 of the glucagon peptide can be restored by stabilization of the alpha-helix structure in the C-terminal portion of the glucagon peptide (around amino acids 12-29). The alpha helix structure can be stabilized by, e.g., formation of a covalent or non-covalent intramolecular bridge (e.g., a lactam bridge between side chains of amino acids at positions “i” and “i+4”, wherein i is an integer from 12 to 25), substitution and/or insertion of amino acids around positions 12-29 with an alpha helix-stabilizing amino acid (e.g., an α,α-disubstituted amino acid), as further described herein.

[0506] Modifications at Position 3

[0507] Glucagon receptor activity can be reduced by an amino acid modification at position 3 (according to the amino acid numbering of wild type glucagon), e.g. substitution of the naturally occurring glutamine at position 3, with an acidic, basic, or a hydrophobic amino acid. For example substitution at position 3 with glutamic acid, ornithine, or norleucine substantially reduces or destroys glucagon receptor activity.

[0508] Maintained or enhanced activity at the glucagon receptor may be achieved by modifying the Gln at position 3 with a glutamine analog as described herein. For example, glucagon agonists can comprise the amino acid sequence of SEQ ID NO: 863, SEQ ID NO: 869, SEQ ID NO: 870, SEQ ID NO: 871, SEQ ID NO: 872, SEQ ID NO: 873, and SEQ ID NO: 874.

[0509] Enhancing GLP-1 Activity with C-terminal Amides and Esters

[0510] Enhanced activity at the GLP-1 receptor is provided by replacing the carboxylic acid of the C-terminal amino acid with a charge-neutral group, such as an amide or ester. Conversely, retaining the native carboxylic acid at the C-terminus of the peptide maintains the relatively greater selectivity of the Class 1 glucagon related peptide for the glucagon receptor vs. the GLP-1 receptor (e.g., greater than about 5, 6, 7, 8, 9, 10, 11, 12, 13, 14, 15, 16, 17, 18, 19, or 20-fold).

[0511] Further Modifications and Combinations

[0512] Additional modifications may be made to the Class 1 glucagon related peptide which may further increase solubility and/or stability and/or glucagon activity. The Class 1 glucagon related peptide may alternatively comprise other modifications that do not substantially affect solubility or stability, and that do not substantially decrease glucagon activity. In exemplary embodiments, the Class 1 glucagon related peptide may comprise a total of up to 11, or up to 12, or up to 13, or up to 14 amino acid modifications relative to the native glucagon sequence. For example, conservative or non-conservative substitutions, additions or deletions may be carried out at any of positions 2, 5, 7, 10, 11, 12, 13, 14, 17, 18, 19, 20, 21, 24, 27, 28 or 29.

[0513] Exemplary modifications of the Class 1 glucagon related peptide include but are not limited to:

[0514] (a) non-conservative substitutions, conservative substitutions, additions or deletions while retaining at least partial glucagon agonist activity, for example, conservative substitutions at one or more of positions 2, 5, 7, 10, 11, 12, 13, 14, 16, 17, 18, 19, 20, 21, 24, 27, 28 or 29, substitution of Tyr at position 10 with Val or Phe, substitution of Lys at position 12 with Arg, substitution of one or more of these positions with Ala;

[0515] (b) deletion of amino acids at positions 29 and/or 28, and optionally position 27, while retaining at least partial glucagon agonist activity;

[0516] (c) modification of the aspartic acid at position 15, for example, by substitution with glutamic acid, homoglutamic acid, cysteic acid or homocysteic acid, which may reduce degradation; or modification of the serine at position 16, for example, by substitution of threonine, AIB, glutamic acid or with another negatively charged amino acid having a side chain with a length of 4 atoms, or alternatively with any one of glutamine, homoglutamic acid, or homocysteic acid, which likewise may reduce degradation due to cleavage of the Asp15-Ser16 bond;

[0517] (d) addition of a hydrophilic moiety such as the water soluble polymer polyethylene glycol, as described herein, e.g. at position 16, 17, 20, 21, 24, 29, 40 or at the C-terminal amino acid, which may increase solubility and/or half-life;

[0518] (e) modification of the methionine at position 27, for example, by substitution with leucine or norleucine, to reduce oxidative degradation;

[0519] (f) modification of the Gln at position 20 or 24, e.g. by substitution with Ser, Thr, Ala or AIB, to reduce degradation that occurs through deamidation of Gln

[0520] (g) modification of Asp at position 21, e.g. by substitution with Glu, to reduce degradation that occurs through dehydration of Asp to form a cyclic succinimide intermediate followed by isomerization to iso-aspartate;

[0521] (h) modifications at position 1 or 2 as described herein that improve resistance to DPP-IV cleavage, optionally in combination with an intramolecular bridge such as a lactam bridge between positions “i” and “i+4”, wherein i is an integer from 12 to 25, e.g., 12, 16, 20, 24;

[0522] (i) acylating or alkylating the glucagon peptide as described herein, which may increase the activity at the glucagon receptor and/or the GLP-1 receptor, increase half-life in circulation and/or extending the duration of action and/or delaying the onset of action, optionally combined with addition of a hydrophilic moiety, additionally or alternatively, optionally combined with a modification which selectively reduces activity at the GLP-1 peptide, e.g., a modification of the Thr at position 7, such as a substitution of the Thr at position 7 with an amino acid lacking a hydroxyl group, e.g., Abu or Ile; deleting amino acids C-terminal to the amino acid at position 27 (e.g., deleting one or both of the amino acids at positions 28 and 29, yielding a peptide 27 or 28 amino acids in length);

[0523] (j) C-terminal extensions as described herein;

[0524] (k) homodimerization or heterodimerization as described herein; and

[0525] combinations of the (a) through (k).

[0526] In some embodiments, exemplary modifications of the Class 1 glucagon related peptide include at least one amino acid modification selected from Group A and one or more amino acid modifications selected from Group B and/or Group C,

[0527] wherein Group A is:
[0528] substitution of Asn at position 28 with a charged amino acid;
[0529] substitution of Asn at position 28 with a charged amino acid selected from the group consisting of Lys, Arg, His, Asp, Glu, cysteic acid, and homocysteic acid;
[0530] substitution at position 28 with Asn, Asp, or Glu;
[0531] substitution at position 28 with Asp;
[0532] substitution at position 28 with Glu;
[0533] substitution of Thr at position 29 with a charged amino acid;
[0534] substitution of Thr at position 29 with a charged amino acid selected from the group consisting of Lys, Arg, His, Asp, Glu, cysteic acid, and homocysteic acid;
[0535] substitution at position 29 with Asp, Glu, or Lys;
[0536] substitution at position 29 with Glu;
[0537] insertion of 1-3 charged amino acids after position 29;
[0538] insertion after position 29 of Glu or Lys;
[0539] insertion after position 29 of Gly-Lys or Lys-Lys;
[0540] or combinations thereof;

[0541] wherein Group B is:
[0542] substitution of Asp at position 15 with Glu;
[0543] substitution of Ser at position 16 with Thr or AIB;

[0544] and wherein Group C is:
[0545] substitution of His at position 1 with a non-native amino acid that reduces susceptibility of the glucagon peptide to cleavage by dipeptidyl peptidase IV (DPP-IV),
[0546] substitution of Ser at position 2 with a non-native amino acid that reduces susceptibility of the glucagon peptide to cleavage by dipeptidyl peptidase IV (DPP-IV),
[0547] substitution of Lys at position 12 with Arg;
[0548] substitution of Gln at position 20 with Ser, Thr, Ala or AIB;
[0549] substitution of Asp at position 21 with Glu;
[0550] substitution of Gln at position 24 with Ser, Thr, Ala or AIB;
[0551] substitution of Met at position 27 with Leu or Nle;
[0552] deletion of amino acids at positions 27-29;
[0553] deletion of amino acids at positions 28-29;
[0554] deletion of the amino acid at positions 29;
[0555] or combinations thereof.

[0556] In exemplary embodiments, Lys at position 12 is substituted with Arg. In other exemplary embodiments amino acids at positions 29 and/or 28, and optionally at position 27, are deleted.

[0557] In some specific embodiments, the glucagon peptide comprises (a) an amino acid modification at position 1 and/or 2 that confers DPP-IV resistance, e.g., substitution with DMIA at position 1, or AIB at position 2, (b) an intramolecular bridge within positions 12-29, e.g. at positions 16 and 20, or one or more substitutions of the amino acids at positions 16, 20, 21, and 24 with an α,α disubstituted amino acid, optionally (c) linked to a hydrophilic moiety such as PEG, e.g., through Cys at position 24, 29 or at the C-terminal amino acid, optionally (d) an amino acid modification at position 27 that substitutes Met with, e.g., Nle, optionally (e) amino acid modifications at positions 20, 21 and 24 that reduce degradation, and optionally (f) linked to SEQ ID NO: 820. When the glucagon peptide is linked to SEQ ID NO: 820, the amino acid at position 29 in certain embodiments is Thr or Gly. In other specific embodiments, the glucagon peptide comprises (a) Asp28Glu29, or Glu28Glu29, or Glu29Glu30, or Glu28Glu30 or Asp28Glu30, and optionally (b) an amino acid modification at position 16 that substitutes Ser with, e.g. Thr or AIB, and optionally (c) an amino acid modification at position 27 that substitutes Met with, e.g., Nle, and optionally (d) amino acid modifications at positions 20, 21 and 24 that reduce degradation. In a specific embodiment, the glucagon peptide is T16, A20, E21, A24, N1e27, D28, E29.

[0558] In some embodiments, the Class 1 glucagon related peptide comprises the amino acid sequence:

[0559] X1-X2-Gln-Gly-Thr-Phe-Thr-Ser-Asp-Tyr-Ser-Lys-Tyr-Leu-Asp-Ser-Arg-Arg-Ala-Gln-Asp-Phe-Val-Gln-Trp-Leu-Met-Z (SEQ ID NO: 839) with 1 to 3 amino acid modifications thereto,

[0560] wherein X1 and/or X2 is a non-native amino acid that reduces susceptibility of (or increases resistance of) the glucagon peptide to cleavage by dipeptidyl peptidase IV (DPP-IV),

[0561] wherein Z is selected from the group consisting of —COOH (the naturally occurring C-terminal carboxylate), -Asn-COOH, Asn-Thr-COOH, and Y—COOH, wherein Y is 1 to 2 amino acids, and

[0562] wherein an intramolecular bridge, preferably a covalent bond, connects the side chains of an amino acid at position i and an amino acid at position i+4, wherein i is 12, 16, 20 or 24.

[0563] In some embodiments, the intramolecular bridge is a lactam bridge. In some embodiments, the amino acids at positions i and i+4 of SEQ ID NO: 839 are Lys and Glu, e.g., Glu16 and Lys20. In some embodiments, X1 is selected from the group consisting of: D-His, N-methyl-His, alpha-methyl-His, imidazole acetic acid, des-amino-His, hydroxyl-His, acetyl-His, homo-His, and alpha, alpha-dimethyl imidiazole acetic acid (DMIA). In other embodiments, X2 is selected from the group consisting of: D-Ser, D-Ala, Gly, N-methyl-Ser, Val, and alpha, amino isobutyric acid (AIB). In some embodiments, the glucagon peptide is covalently linked to a hydrophilic moiety at any of amino acid positions 16, 17, 20, 21, 24, 29, 40, within a C-terminal extension, or at the C-terminal amino acid. In exemplary embodiments, this hydrophilic moiety is covalently linked to a Lys, Cys, Orn, homocysteine, or acetyl-phenylalanine residue at any of these positions. Exemplary hydrophilic moieties include polyethylene glycol (PEG), for example, of a molecular weight of about 1,000 Daltons to about 40,000 Daltons, or about 20,000 Daltons to about 40,000 Daltons.

[0564] In other embodiments, the Class I glucagon related peptide comprises the amino acid sequence:

(SEQ ID NO: 839)
X1-X2-Gln-Gly-Thr-Phe-Thr-Ser-Asp-Tyr-Ser-Lys-
Tyr-Leu-Asp-Ser-Arg-Arg-Ala-Gln-Asp-Phe-Val-Gln-
Trp-Leu-Met-Z,

[0565] wherein X1 and/or X2 is a non-native amino acid that reduces susceptibility of (or increases resistance of) the glucagon peptide to cleavage by dipeptidyl peptidase IV (DPP-IV),

[0566] wherein one, two, three, four or more of positions 16, 20, 21, and 24 of the glucagon peptide is substituted with an α,α-disubstituted amino acid, and

[0567] wherein Z is selected from the group consisting of —COOH (the naturally occurring C-terminal carboxylate), -Asn-COOH, Asn-Thr-COOH, and Y—COOH, wherein Y is 1 to 2 amino acids.

[0568] Exemplary further amino acid modifications to the foregoing Class 1 glucagon related peptides or analogs include substitution of Thr at position 7 with an amino acid lacking a hydroxyl group, e.g., aminobutyric acid (Abu), Ile, optionally, in combination with substitution or addition of an amino acid comprising a side chain covalently attached (optionally, through a spacer) to an acyl or alkyl group, which acyl or alkyl group is non-native to a naturally-occurring amino acid, substitution of Lys at position 12 with Arg; substitution of Asp at position 15 with Glu; substitution of Ser at position 16 with Thr or AIB; substitution of Gln at position 20 with Ser, Thr, Ala or AIB; substitution of Asp at position 21 with Glu; substitution of Gln at position 24 with Ser, Thr, Ala or AIB; substitution of Met at position 27 with Leu or Nle; substitution of Asn at position 28 with a charged amino acid; substitution of Asn at position 28 with a charged amino acid selected from the group consisting of Lys, Arg, His, Asp, Glu, cysteic acid, and homocysteic acid; substitution at position 28 with Asn, Asp, or Glu; substitution at position 28 with Asp; substitution at position 28 with Glu; substitution of Thr at position 29 with a charged amino acid; substitution of Thr at position 29 with a charged amino acid selected from the group consisting of Lys, Arg, His, Asp, Glu, cysteic acid, and homocysteic acid; substitution at position 29 with Asp, Glu, or Lys; substitution at position 29 with Glu; insertion of 1-3 charged amino acids after position 29; insertion at position 30 (i.e., after position 29) of Glu or Lys; optionally with insertion at position 31 of Lys; addition of SEQ ID NO: 820 to the C-terminus, optionally, wherein the amino acid at position 29 is Thr or Gly; substitution or addition of an amino acid covalently attached to a hydrophilic moiety; or a combination thereof.

[0569] Any of the modifications described above in reference to Class 1 glucagon agonists which increase glucagon receptor activity, retain partial glucagon receptor activity, improve solubility, increase stability, or reduce degradation can be applied to Class 1 glucagon peptides individually or in combination. Thus, Class 1 glucagon related peptides can be prepared that retain at least 20% of the activity of native glucagon at the glucagon receptor, and which are soluble at a concentration of at least 1 mg/mL at a pH between 6 and 8 or between 6 and 9, (e.g. pH 7), and optionally retain at least 95% of the original peptide (e.g. 5% or less of the original peptide is degraded or cleaved) after 24 hours at 25° C. Alternatively, high potency Class 1 glucagon peptides can be prepared that exhibit at least about 100%, 125%, 150%, 175%, 200%, 250%, 300%, 350%, 400%, 450%, 500%, 600%, 700%, 800%, 900% or 10-fold or more of the activity of native glucagon at the glucagon receptor, and optionally are soluble at a concentration of at least 1 mg/mL at a pH between 6 and 8 or between 6 and 9, (e.g. pH 7), and optionally retains at least 95% of the original peptide (e.g. 5% or less of the original peptide is degraded or cleaved) after 24 hours at 25° C. In some embodiments, the Class 1 glucagon peptides described herein may exhibit at least any of the above indicated relative levels of activity at the glucagon receptor but no more than 10,000%, 100,000% or 1,000,000% of the activity of native glucagon at the glucagon receptor.

[0570] Examples of Embodiments of Class 1 Glucagon Related Peptides

[0571] In accordance with some embodiments the native glucagon peptide of SEQ ID NO: 801 is modified by the substitution of the native amino acid at position 28 and/or 29 with a negatively charged amino acid (e.g., aspartic acid or glutamic acid) and optionally the addition of a negatively charged amino acid (e.g., aspartic acid or glutamic acid) to the carboxy terminus of the peptide. In an alternative embodiment the native glucagon peptide of SEQ ID NO: 801 is modified by the substitution of the native amino acid at position 29 with a positively charged amino acid (e.g., lysine, arginine or histidine) and optionally the addition of one or two positively charged amino acid (e.g., lysine, arginine or histidine) on the carboxy terminus of the peptide. In accordance with some embodiments a glucagon analog having improved solubility and stability is provided wherein the analog comprises the amino acid sequence of SEQ ID NO: 834 with the proviso that at least one amino acids at position, 28, or 29 is substituted with an acidic amino acid and/or an additional acidic amino acid is added at the carboxy terminus of SEQ ID NO: 834. In some embodiments the acidic amino acids are independently selected from the group consisting of Asp, Glu, cysteic acid and homocysteic acid.

[0572] In accordance with some embodiments a glucagon agonist having improved solubility and stability is provided wherein the agonist comprises the amino acid sequence of SEQ ID NO: 833, wherein at least one of the amino acids at positions 27, 28 or 29 is substituted with a non-native amino acid residue (i.e. at least one amino acid present at position 27, 28 or 29 of the analog is an acid amino acid different from the amino acid present at the corresponding position in SEQ ID NO: 801). In accordance with some embodiments a glucagon agonist is provided comprising the sequence of SEQ ID NO: 833 with the proviso that when the amino acid at position 28 is asparagine and the amino acid at position 29 is threonine, the peptide further comprises one to two amino acids, independently selected from the group consisting of Lys, Arg, His, Asp or Glu, added to the carboxy terminus of the glucagon peptide.

[0573] It has been reported that certain positions of the native glucagon peptide can be modified while retaining at least some of the activity of the parent peptide. Accordingly, applicants anticipate that one or more of the amino acids located at positions at positions 2, 5, 7, 10, 11, 12, 13, 14, 16, 17, 18, 19, 20, 21, 24, 27, 28 or 29 of the peptide of SEQ ID NO: 811 can be substituted with an amino acid different from that present in the native glucagon peptide, and still retain the enhanced potency, physiological pH stability and biological activity of the parent glucagon peptide. For example, in accordance with some embodiments the methionine residue present at position 27 of the native peptide is changed to leucine or norleucine to prevent oxidative degradation of the peptide.

[0574] In some embodiments a glucagon analog of SEQ ID NO: 833 is provided wherein 1 to 6 amino acids, selected from positions 1, 2, 5, 7, 10, 11, 12, 13, 14, 16, 17, 18, 19, 20, 21 or 24 of the analog differ from the corresponding amino acid of SEQ ID NO: 801. In accordance with another embodiment a glucagon analog of SEQ ID NO: 833 is provided wherein 1 to 3 amino acids selected from positions 1, 2, 5, 7, 10, 11, 12, 13, 14, 16, 17, 18, 19, 20, 21 or 24 of the analog differ from the corresponding amino acid of SEQ ID NO: 801. In another embodiment, a glucagon analog of SEQ ID NO: 807, SEQ ID NO: 808 or SEQ ID NO: 834 is provided wherein 1 to 2 amino acids selected from positions 1, 2, 5, 7, 10, 11, 12, 13, 14, 16, 17, 18, 19, 20, 21 or 24 of the analog differ from the corresponding amino acid of SEQ ID NO: 801, and in a further embodiment those one to two differing amino acids represent conservative amino acid substitutions relative to the amino acid present in the native sequence (SEQ ID NO: 801). In some embodiments a glucagon peptide of SEQ ID NO: 811 or SEQ ID NO: 813 is provided wherein the glucagon peptide further comprises one, two or three amino acid substitutions at positions selected from positions 2, 5, 7, 10, 11, 12, 13, 14, 16, 17, 18, 19, 20, 21, 24, 27 or 29. In some embodiments the substitutions at positions 2, 5, 7, 10, 11, 12, 13, 14, 16, 17, 18, 19, 20, 27 or 29 are conservative amino acid substitutions.

[0575] In some embodiments a glucagon agonist is provided comprising an analog peptide of SEQ ID NO: 801 wherein the analog differs from SEQ ID NO: 801 by having an amino acid other than serine at position 2 and by having an acidic amino acid substituted for the native amino acid at position 28 or 29 or an acidic amino acid added to the carboxy terminus of the peptide of SEQ ID NO: 801. In some embodiments the acidic amino acid is aspartic acid or glutamic acid. In some embodiments a glucagon analog of SEQ ID NO: 809, SEQ ID NO: 812, SEQ ID NO: 813 or SEQ ID NO: 832 is provided wherein the analog differs from the parent molecule by a substitution at position 2. More particularly, position 2 of the analog peptide is substituted with an amino acid selected from the group consisting of D-serine, alanine, D-alanine, glycine, n-methyl serine and amino isobutyric acid.

[0576] In another embodiment a glucagon agonist is provided comprising an analog peptide of SEQ ID NO: 801 wherein the analog differs from SEQ ID NO: 801 by having an amino acid other than histidine at position 1 and by having an acidic amino acid substituted for the native amino acid at position 28 or 29 or an acidic amino acid added to the carboxy terminus of the peptide of SEQ ID NO: 801. In some embodiments the acidic amino acid is aspartic acid or glutamic acid. In some embodiments a glucagon analog of SEQ ID NO: 809, SEQ ID NO: 812, SEQ ID NO: 813 or SEQ ID NO: 832 is provided wherein the analog differs from the parent molecule by a substitution at position 1. More particularly, position 1 of the analog peptide is substituted with an amino acid selected from the group consisting of DMIA, D-histidine, desaminohistidine, hydroxyl-histidine, acetyl-histidine and homo-histidine.

[0577] In accordance with some embodiments the modified glucagon peptide comprises a sequence selected from the group consisting of SEQ ID NO: 809, SEQ ID NO: 812, SEQ ID NO: 813 and SEQ ID NO: 832. In a further embodiment a glucagon peptide is provided comprising a sequence of SEQ ID NO: 809, SEQ ID NO: 812, SEQ ID NO: 813 or SEQ ID NO: 832 further comprising one to two amino acids, added to the C-terminus of SEQ ID NO: 809, SEQ ID NO: 812, SEQ ID NO: 813 or SEQ ID NO: 832, wherein the additional amino acids are independently selected from the group consisting of Lys, Arg, His, Asp Glu, cysteic acid or homocysteic acid. In some embodiments the additional amino acids added to the carboxy terminus are selected from the group consisting of Lys, Arg, His, Asp or Glu or in a further embodiment the additional amino acids are Asp or Glu.

[0578] In another embodiment the glucagon peptide comprises the sequence of SEQ ID NO: 7 or a glucagon agonist analog thereof. In some embodiments the peptide comprising a sequence selected from the group consisting of SEQ ID NO: 808, SEQ ID NO: 810, SEQ ID NO: 811, SEQ ID NO: 812 and SEQ ID NO: 813. In another embodiment the peptide comprising a sequence selected from the group consisting of SEQ ID NO: 808, SEQ ID NO: 810 and SEQ ID NO: 811. In some embodiments the glucagon peptide comprises the sequence of SEQ ID NO: 808, SEQ ID NO: 810 and SEQ ID NO: 811 further comprising an additional amino acid, selected from the group consisting of Asp and Glu, added to the C-terminus of the glucagon peptide. In some embodiments the glucagon peptide comprises the sequence of SEQ ID NO: 811 or SEQ ID NO: 813, and in a further embodiment the glucagon peptide comprises the sequence of SEQ ID NO: 811.

[0579] In accordance with some embodiments a glucagon agonist is provided comprising a modified glucagon peptide selected from the group consisting of:

(SEQ ID NO: 834)
NH₂-His-Ser-Gln-Gly-Thr-Phe-Thr-Ser-Asp-Tyr-Ser-
Lys-Tyr-Leu-Xaa-Ser-Arg-Arg-Ala-Gln-Asp-Phe-Val-
Gln-Trp-Leu-Xaa-Xaa-Xaa-R,
(SEQ ID NO: 811)
NH₂-His-Ser-Gln-Gly-Thr-Phe-Thr-Ser-Asp-Tyr-Ser-
Lys-Tyr-Leu-Asp-Ser-Arg-Arg-Ala-Gln-Asp-Phe-Val-
Gln-Trp-Leu-Met-Asp-Thr-R
and
(SEQ ID NO: 813)
NH₂-His-Ser-Gln-Gly-Thr-Phe-Thr-Ser-Asp-Tyr-Ser-
Xaa-Tyr-Leu-Glu-Ser-Arg-Arg-Ala-Gln-Asp-Phe-Val-
Gln-Trp-Leu-Met-Asp-Thr-R

[0580] wherein Xaa at position 15 is Asp, Glu, cysteic acid, homoglutamic acid or homocysteic acid, the Xaa at position 28 is Asn or an acidic amino acid and the Xaa at position 29 is Thr or an acidic amino acid and R is an acidic amino acid, COOH or CONH₂, with the proviso that an acidic acid residue is present at one of positions 28, 29 or 30. In some embodiments R is COOH, and in another embodiment R is CONH₂.

[0581] The present disclosure also encompasses glucagon fusion peptides wherein a second peptide has been fused to the C-terminus of the glucagon peptide to enhance the stability and solubility of the glucagon peptide. More particularly, the fusion glucagon peptide may comprise a glucagon agonist analog comprising a glucagon peptide NH₂-His-Ser-Gln-Gly-Thr-Phe-Thr-Ser-Asp-Tyr-Ser-Lys-Tyr-Leu-Xaa-Ser-Arg-Arg-Ala-Gln-Asp-Phe-Val-Gln-Trp-Leu-Xaa-Xaa-Xaa-R (SEQ ID NO: 834), wherein R is an acidic amino acid or a bond and an amino acid sequence of SEQ ID NO: 820 (GPSSGAPPPS), SEQ ID NO: 821 (KRNRNNIA) or SEQ ID NO: 822 (KRNR) linked to the carboxy terminal amino acid of the glucagon peptide. In some embodiments the glucagon peptide is selected from the group consisting of SEQ ID NO: 833, SEQ ID NO: 807 or SEQ ID NO: 808 further comprising an amino acid sequence of SEQ ID NO: 820 (GPSSGAPPPS), SEQ ID NO: 821 (KRNRNNIA) or SEQ ID NO: 822 (KRNR) linked to the carboxy terminal amino acid of the glucagon peptide. In some embodiments the glucagon fusion peptide comprises SEQ ID NO: 802, SEQ ID NO: 803, SEQ ID NO: 804, SEQ ID NO: 805 and SEQ ID NO: 806 or a glucagon agonist analog thereof, further comprising an amino acid sequence of SEQ ID NO: 820 (GPSSGAPPPS), SEQ ID NO: 821 (KRNRNNIA) or SEQ ID NO: 822 (KRNR) linked to amino acid 29 of the glucagon peptide. In accordance with some embodiments the fusion peptide further comprises a PEG chain linked to an amino acid at position 16, 17, 21, 24, 29, within a C-terminal extension, or at the C-terminal amino acid, wherein the PEG chain is selected from the range of 500 to 40,000 Daltons. In some embodiments the amino acid sequence of SEQ ID NO: 820 (GPSSGAPPPS), SEQ ID NO: 821 (KRNRNNIA) or SEQ ID NO: 822 (KRNR) is bound to amino acid 29 of the glucagon peptide through a peptide bond. In some embodiments the glucagon peptide portion of the glucagon fusion peptide comprises a sequence selected from the group consisting of SEQ ID NO: 810, SEQ ID NO: 811 and SEQ ID NO: 813. In some embodiments the glucagon peptide portion of the glucagon fusion peptide comprises the sequence of SEQ ID NO: 811 or SEQ ID NO: 813, wherein a PEG chain is linked at position 21, 24, 29, within a C-terminal extension or at the C-terminal amino acid, respectively.

[0582] In another embodiment the glucagon peptide sequence of the fusion peptide comprises the sequence of SEQ ID NO: 811, further comprising an amino acid sequence of SEQ ID NO: 820 (GPSSGAPPPS), SEQ ID NO: 821 (KRNRNNIA) or SEQ ID NO: 822 (KRNR) linked to amino acid 29 of the glucagon peptide. In some embodiments the glucagon fusion peptide comprises a sequence selected from the group consisting of SEQ ID NO: 824, SEQ ID NO: 825 and SEQ ID NO: 826. Typically the fusion peptides of the present invention will have a C-terminal amino acid with the standard carboxylic acid group. However, analogs of those sequences wherein the C-terminal amino acid has an amide substituted for the carboxylic acid are also encompassed as embodiments. In accordance with some embodiments the fusion glucagon peptide comprises a glucagon agonist analog selected from the group consisting of SEQ ID NO: 810, SEQ ID NO: 811 and SEQ ID NO: 813, further comprising an amino acid sequence of SEQ ID NO: 823 (GPSSGAPPPS-CONH₂) linked to amino acid 29 of the glucagon peptide.

[0583] The glucagon agonists of the present invention can be further modified to improve the peptide's solubility and stability in aqueous solutions while retaining the biological activity of the glucagon peptide. In accordance with some embodiments, introduction of hydrophilic groups at one or more positions selected from positions 16, 17, 20, 21, 24 and 29 of the peptide of SEQ ID NO: 811, or a glucagon agonist analog thereof, are anticipated to improve the solubility and stability of the pH stabilize glucagon analog. More particularly, in some embodiments the glucagon peptide of SEQ ID NO: 810, SEQ ID NO: 811, SEQ ID NO: 813, or SEQ ID NO: 832 is modified to comprise one or more hydrophilic groups covalently linked to the side chains of amino acids present at positions 21 and 24 of the glucagon peptide.

[0584] In accordance with some embodiments, the glucagon peptide of SEQ ID NO: 811 is modified to contain one or more amino acid substitution at positions 16, 17, 20, 21, 24 and/or 29, wherein the native amino acid is substituted with an amino acid having a side chain suitable for crosslinking with hydrophilic moieties, including for example, PEG. The native peptide can be substituted with a naturally occurring amino acid or a synthetic (non-naturally occurring) amino acid. Synthetic or non-naturally occurring amino acids refer to amino acids that do not naturally occur in vivo but which, nevertheless, can be incorporated into the peptide structures described herein.

[0585] In some embodiments, a glucagon agonist of SEQ ID NO: 810, SEQ ID NO: 811 or SEQ ID NO: 813 is provided wherein the native glucagon peptide sequence has been modified to contain a naturally occurring or synthetic amino acid in at least one of positions 16, 17, 21, 24, 29, within a C-terminal extension or at the C-terminal amino acid of the native sequence, wherein the amino acid substitute further comprises a hydrophilic moiety. In some embodiments the substitution is at position 21 or 24, and in a further embodiment the hydrophilic moiety is a PEG chain. In some embodiments the glucagon peptide of SEQ ID NO: 811 is substituted with at least one cysteine residue, wherein the side chain of the cysteine residue is further modified with a thiol reactive reagent, including for example, maleimido, vinyl sulfone, 2-pyridylthio, haloalkyl, and haloacyl. These thiol reactive reagents may contain carboxy, keto, hydroxyl, and ether groups as well as other hydrophilic moieties such as polyethylene glycol units. In an alternative embodiment, the native glucagon peptide is substituted with lysine, and the side chain of the substituting lysine residue is further modified using amine reactive reagents such as active esters (succinimido, anhydride, etc) of carboxylic acids or aldehydes of hydrophilic moieties such as polyethylene glycol. In some embodiments the glucagon peptide is selected form the group consisting of SEQ ID NO: 814, SEQ ID NO: 815, SEQ ID NO: 816, SEQ ID NO: 817, SEQ ID NO: 818 and SEQ ID NO: 819.

[0586] In accordance with some embodiments the pegylated glucagon peptide comprises two or more polyethylene glycol chains covalently bound to the glucagon peptide wherein the total molecular weight of the glucagon chains is about 1,000 to about 5,000 Daltons. In some embodiments the pegylated glucagon agonist comprises a peptide of SEQ ID NO: 806, wherein a PEG chain is covalently linked to the amino acid residue at position 21 and at position 24, and wherein the combined molecular weight of the two PEG chains is about 1,000 to about 5,000 Daltons. In another embodiment the pegylated glucagon agonist comprises a peptide of SEQ ID NO: 806, wherein a PEG chain is covalently linked to the amino acid residue at position 21 and at position 24, and wherein the combined molecular weight of the two PEG chains is about 5,000 to about 20,000 Daltons.

[0587] The polyethylene glycol chain may be in the form of a straight chain or it may be branched. In accordance with some embodiments the polyethylene glycol chain has an average molecular weight selected from the range of about 500 to about 40,000 Daltons. In some embodiments the polyethylene glycol chain has a molecular weight selected from the range of about 500 to about 5,000 Daltons. In another embodiment the polyethylene glycol chain has a molecular weight of about 20,000 to about 40,000 Daltons.

[0588] Any of the glucagon peptides described above may be further modified to include a covalent or non-covalent intramolecular bridge or an alpha helix-stabilizing amino acid within the C-terminal portion of the glucagon peptide (amino acid positions 12-29). In accordance with some embodiments, the glucagon peptide comprises any one or more of the modifications discussed above in addition to an amino acid substitution at positions 16, 20, 21, or 24 (or a combination thereof) with an α,α-disubstituted amino acid, e.g., AIB. In accordance with another embodiment, the glucagon peptide comprises any one or more modifications discussed above in addition to an intramolecular bridge, e.g., a lactam, between the side chains of the amino acids at positions 16 and 20 of the glucagon peptide.

[0589] In accordance with some embodiments, the glucagon peptide comprises the amino acid sequence of SEQ ID NO: 877, wherein the Xaa at position 3 is an amino acid comprising a side chain of Structure I, II, or III:

[chemical structure]

wherein R¹ is C₀₋₃ alkyl or C₀₋₃ heteroalkyl; R² is NHR⁴ or C₁₋₃ alkyl; R³ is C₁₋₃ alkyl; R⁴ is H or C₁₋₃ alkyl; X is NH, O, or S; and Y is NHR⁴, SR³, or OR³. In some embodiments, X is NH or Y is NHR⁴. In some embodiments, R¹ is C₀₋₂ alkyl or C₁ heteroalkyl. In some embodiments, R² is NHR⁴ or C₁ alkyl. In some embodiments, R⁴ is H or C¹ alkyl. In exemplary embodiments an amino acid comprising a side chain of Structure I is provided wherein, R¹ is CH₂—S, X is NH, and R² is CH₃ (acetamidomethyl-cysteine, C(Acm)); R¹ is CH₂, X is NH, and R² is CH₃ (acetyldiaminobutanoic acid, Dab(Ac)); R¹ is C₀ alkyl, X is NH, R² is NHR⁴, and R⁴ is H (carbamoyldiaminopropanoic acid, Dap(urea)); or R¹ is CH₂—CH₂, X is NH, and R² is CH₃ (acetylornithine, Orn(Ac)). In exemplary embodiments an amino acid comprising a side chain of Structure II is provided, wherein R¹ is CH₂, Y is NHR⁴, and R⁴ is CH₃ (methylglutamine, Q(Me)); In exemplary embodiments an amino acid comprising a side chain of Structure III is provided wherein, R¹ is CH₂ and R⁴ is H (methionine-sulfoxide, M(O)); In specific embodiments, the amino acid at position 3 is substituted with Dab(Ac). For example, glucagon agonists can comprise the amino acid sequence of SEQ ID NO: 863, SEQ ID NO: 869, SEQ ID NO: 871, SEQ ID NO: 872, SEQ ID NO: 873, and SEQ ID NO: 874.

[0590] In certain embodiments, the glucagon peptide is an analog of the glucagon peptide of SEQ ID NO: 877. In specific aspects, the analog comprises any of the amino acid modifications described herein, including, but not limited to: a substitution of Asn at position 28 with a charged amino acid; a substitution of Asn at position 28 with a charged amino acid selected from the group consisting of Lys, Arg, His, Asp, Glu, cysteic acid, and homocysteic acid; a substitution at position 28 with Asn, Asp, or Glu; a substitution at position 28 with Asp; a substitution at position 28 with Glu; a substitution of Thr at position 29 with a charged amino acid; a substitution of Thr at position 29 with a charged amino acid selected from the group consisting of Lys, Arg, His, Asp, Glu, cysteic acid, and homocysteic acid; a substitution at position 29 with Asp, Glu, or Lys; a substitution at position 29 with Glu; a insertion of 1-3 charged amino acids after position 29; an insertion after position 29 of Glu or Lys; an insertion after position 29 of Gly-Lys or Lys-Lys; and a combination thereof.

[0591] In certain embodiments, the analog of the glucagon peptide of SEQ ID NO: 877 comprises an α,α-disubstituted amino acid, such as AIB, at one, two, three, or all of positions 16, 20, 21, and 24.

[0592] In certain embodiments, the analog of the glucagon peptide of SEQ ID NO: 877 comprises one or more of the following: substitution of His at position 1 with a non-native amino acid that reduces susceptibility of the glucagon peptide to cleavage by dipeptidyl peptidase IV (DPP-IV), substitution of Ser at position 2 with a non-native amino acid that reduces susceptibility of the glucagon peptide to cleavage by dipeptidyl peptidase IV (DPP-IV), substitution of Thr at position 7 with an amino acid lacking a hydroxyl group, e.g., Abu or Ile; substitution of Tyr at position 10 with Phe or Val; substitution of Lys at position 12 with Arg; substitution of Asp at position 15 with Glu, substitution of Ser at position 16 with Thr or AIB; substitution of Gln at position 20 with Ala or AIB; substitution of Asp at position 21 with Glu; substitution of Gln at position 24 with Ala or AIB; substitution of Met at position 27 with Leu or Nle; deletion of amino acids at positions 27-29; deletion of amino acids at positions 28-29; deletion of the amino acid at positions 29; addition of the amino acid sequence of SEQ ID NO: 820 to the C-terminus, wherein the amino acid at position 29 is Thr or Gly, or a combination thereof.

[0593] In accordance with specific embodiments, the glucagon peptide comprises the amino acid sequence of any of SEQ ID NOs: 862-867 and 869-874.

[0594] In certain embodiments, the analog of the glucagon peptide comprising SEQ ID NO: 877 comprises a hydrophilic moiety, e.g., PEG, covalently linked to the amino acid at any of positions 16, 17, 20, 21, 24, and 29 or at the C-terminal amino acid.

[0595] In certain embodiments, the analog of the glucagon peptide comprising SEQ ID NO: 877 comprises an amino acid comprising a side chain covalently attached, optionally, through a spacer, to an acyl group or an alkyl group, which acyl group or alkyl group is non-native to a naturally-occurring amino acid. The acyl group in some embodiments is a C4 to C30 fatty acyl group. In other embodiments, the alkyl group is a C₄ to C₃₀ alkyl. In specific aspects, the acyl group or alkyl group is covalently attached to the side chain of the amino acid at position 10. In some embodiments, the amino acid at position 7 is Ile or Abu.

[0596] The glucagon agonist may be a peptide comprising the amino acid sequence of any of the SEQ ID NOs: 801-919, optionally with up to 1, 2, 3, 4, or 5 further modifications that retain glucagon agonist activity. In certain embodiments, the glucagon agonist comprises the amino acids of any of SEQ ID NOs: 859-919.

[0597] Class 2 Glucagon Related Peptides

[0598] In certain embodiments, the glucagon related peptide is a Class 2 glucagon related peptide, which is described herein and in International Patent Application No. PCT US2009/47447 (filed on Jun. 16, 2009), U.S. Provisional Application No. 61/090,448, and U.S. Application No. 61/151,349, the contents of which are incorporated by reference in their entirety.

[0599] The biological sequences referenced in the following section (SEQ ID NOs: 1001-1262) relating to Class 2 glucagon related peptides correspond to SEQ ID NOs: 1-262 in International Patent Application No. PCT US2009/47447.

[0600] Activity

[0601] Native glucagon does not activate the GIP receptor, and normally has about 1% of the activity of native-GLP-1 at the GLP-1 receptor. Modifications to the native glucagon sequence described herein produce Class 2 glucagon related peptides that can exhibit potent glucagon activity equivalent to or better than the activity of native glucagon (SEQ ID NO: 1001), potent GIP activity equivalent to or better than the activity of native GIP (SEQ ID NO: 1004), and/or potent GLP-1 activity equivalent to or better than the activity of native GLP-1. In this regard, the Class 2 glucagon related peptide may be one of a glucagon/GIP co-agonist, glucagon/GIP/GLP-1 tri-agonist, GIP/GLP-1 co-agonist, or a GIP agonist glucagon peptide, as further described herein.

[0602] In some embodiments, the Class 2 glucagon related peptides described herein exhibit an EC50 for GIP receptor activation activity of about 100 nM or less, or about 75, 50, 25, 10, 8, 6, 5, 4, 3, 2 or 1 nM or less. In some embodiments, the Class 2 glucagon related peptides exhibit an EC50 for glucagon receptor activation of about 100 nM or less, or about 75, 50, 25, 10, 8, 6, 5, 4, 3, 2 or 1 nM or less. In some embodiments, the Class 2 glucagon related peptides exhibit an EC50 for GLP-1 receptor activation of about 100 nM or less, or about 75, 50, 25, 10, 8, 6, 5, 4, 3, 2 or 1 nM or less. Receptor activation can be measured by in vitro assays measuring cAMP induction in HEK293 cells over-expressing the receptor, e.g. assaying HEK293 cells co-transfected with DNA encoding the receptor and a luciferase gene linked to cAMP responsive element as described in Example 5.

[0603] In some embodiments, Class 2 glucagon related peptides exhibit at least about 0.1%, 0.2%, 0.3%, 0.4%, 0.5%, 0.6%, 0.7%, 0.8%, 0.9%, 1%, 5%, 10%, 20%, 30%, 40%, 50%, 60%, 75%, 100%, 125%, 150%, 175% or 200% or higher activity at the GIP receptor relative to native GIP (GIP potency). In some embodiments, the glucagon peptides described herein exhibit no more than 1000%, 10,000%, 100,000%, or 1,000,000% activity at the GIP receptor relative to native GIP. In some embodiments, Class 2 glucagon related peptides exhibit at least about 1%, 5%, 10%, 20%, 30%, 40%, 50%, 60%, 75%, 100%, 125%, 150%, 175%, 200%, 250%, 300%, 350%, 400%, 450%, or 500% or higher activity at the glucagon receptor relative to native glucagon (glucagon potency). In some embodiments, the glucagon peptides described herein exhibit no more than 1000%, 10,000%, 100,000%, or 1,000,000% activity at the glucagon receptor relative to native glucagon. In some embodiments, Class 2 glucagon related peptides exhibit at least about 0.1%, 0.2%, 0.3%, 0.4%, 0.5%, 0.6%, 0.7%, 0.8%, 0.9%, 1%, 5%, 10%, 20%, 30%, 40%, 50%, 60%, 75%, 100%, 125%, 150%, 175% or 200% or higher activity at the GLP-1 receptor relative to native GLP-1 (GLP-1 potency). In some embodiments, the glucagon peptides described herein exhibit no more than 1000%, 10,000%, 100,000%, or 1,000,000% activity at the GLP-1 receptor relative to native GLP-1. A Class 2 glucagon related peptide's activity at a receptor relative to a native ligand of the receptor is calculated as the inverse ratio of EC50s for the Class 2 glucagon related peptide vs. the native ligand.

[0604] In some embodiments, Class 2 glucagon related peptides exhibit activity at both the glucagon receptor and the GIP receptor (“glucagon/GIP co-agonists”). These Class 2 glucagon related peptides have lost native glucagon's selectivity for glucagon receptor compared to GIP receptor. In some embodiments, the EC50 of the Class 2 glucagon related peptide at the GIP receptor is less than about 50-fold, 40-fold, 30-fold or 20-fold different (higher or lower) from its EC50 at the glucagon receptor. In some embodiments, the GIP potency of the Class 2 glucagon related peptide is less than about 500-, 450-, 400-, 350-, 300-, 250-, 200-, 150-, 100-, 75-, 50-, 25-, 20-, 15-, 10-, or 5-fold different (higher or lower) from its glucagon potency. In some embodiments, the ratio of the EC50 of the Class 2 glucagon related peptide at the GIP receptor divided by the EC50 of the Class 2 glucagon related peptide at the glucagon receptor is less than about 100, 75, 60, 50, 40, 30, 20, 15, 10, or 5. In some embodiments, the ratio of the EC50 at the GIP receptor divided by the EC50 at the glucagon receptor is about 1 or less than about 1 (e.g., about 0.01, 0.013, 0.0167, 0.02, 0.025, 0.03, 0.05, 0.067, 0.1, 0.2). In some embodiments, the ratio of the GIP potency of the Class 2 glucagon related peptide compared to the glucagon potency of the Class 2 glucagon related peptide is less than about 500, 450, 400, 350, 300, 250, 200, 150, 100, 75, 60, 50, 40, 30, 20, 15, 10, or 5. In some embodiments, the ratio of the potency at the GIP receptor divided by the potency at the glucagon receptor is about 1 or less than about 1 (e.g., about 0.01, 0.013, 0.0167, 0.02, 0.025, 0.03, 0.05, 0.067, 0.1, 0.2). In some embodiments, GLP-1 activity have been significantly reduced or destroyed, e.g., by an amino acid modification at position 7, a deletion of the amino acid(s) C-terminal to the amino acid at position 27 or 28, yielding a 27- or 28-amino acid peptide, or a combination thereof.

[0605] In another aspect, Class 2 glucagon related peptides exhibit activity at the glucagon, GIP and GLP-1 receptors (“glucagon/GIP/GLP-1 tri-agonists”). These Class 2 glucagon related peptides have lost native glucagon's selectivity for the glucagon receptor compared to both the GLP-1 and GIP receptors. In some embodiments, the EC50 of the Class 2 glucagon related peptide at the GIP receptor is less than about 50-fold, 40-fold, 30-fold or 20-fold different (higher or lower) from its respective EC50s at the glucagon and GLP-1 receptors. In some embodiments, the GIP potency of the Class 2 glucagon related peptide is less than about 500-, 450-, 400-, 350-, 300-, 250-, 200-, 150-, 100-, 75-, 50-, 25-, 20-, 15-, 10-, or 5-fold different (higher or lower) from its glucagon and GLP-1 potencies. In some embodiments, the ratio of the EC50 of the tri-agonist at the GIP receptor divided by the EC50 of the tri-agonist at the GLP-1 receptor is less than about 100, 75, 60, 50, 40, 30, 20, 15, 10, or 5. In some embodiments, the ratio of the EC50 at the GIP receptor divided by the EC50 at the GLP-1 receptor is about 1 or less than about 1 (e.g., about 0.01, 0.013, 0.0167, 0.02, 0.025, 0.03, 0.05, 0.067, 0.1, 0.2). In some embodiments, the ratio of the GIP potency of the tri-agonist compared to the GLP-1 potency of the tri-agonist is less than about 100, 75, 60, 50, 40, 30, 20, 15, 10, or 5. In some embodiments, the ratio of the potency at the GIP receptor divided by the potency at the GLP-1 receptor is about 1 or less than about 1 (e.g., about 0.01, 0.013, 0.0167, 0.02, 0.025, 0.03, 0.05, 0.067, 0.1, 0.2). In related embodiments, the ratio of the EC50 of the tri-agonist at the GIP receptor divided by the EC50 of the tri-agonist at the glucagon receptor is less than about 100, 75, 60, 50, 40, 30, 20, 15, 10, or 5. In some embodiments, the ratio of the EC50 at the GIP receptor divided by the EC50 at the glucagon receptor is about 1 or less than about 1 (e.g., about 0.01, 0.013, 0.0167, 0.02, 0.025, 0.03, 0.05, 0.067, 0.1, 0.2). In some embodiments, the ratio of the GIP potency of the tri-agonist compared to the glucagon potency of the tri-agonist is less than about 500, 450, 400, 350, 300, 250, 200, 150, 100, 75, 60, 50, 40, 30, 20, 15, 10, or 5. In some embodiments, the ratio of the potency at the GIP receptor divided by the potency at the glucagon receptor is about 1 or less than about 1 (e.g., about 0.01, 0.013, 0.0167, 0.02, 0.025, 0.03, 0.05, 0.067, 0.1, 0.2). In some embodiments, the ratio of the EC50 of the tri-agonist at the GLP-1 receptor divided by the EC50 of the tri-agonist at the glucagon receptor is less than about 100, 75, 60, 50, 40, 30, 20, 15, 10, or 5. In some embodiments, the ratio of the EC50 at the GLP-1 receptor divided by the EC50 at the glucagon receptor is about 1 or less than about 1 (e.g., about 0.01, 0.013, 0.0167, 0.02, 0.025, 0.03, 0.05, 0.067, 0.1, 0.2). In some embodiments, the ratio of the GLP-1 potency of the tri-agonist compared to the glucagon potency of the tri-agonist is less than about 100, 75, 60, 50, 40, 30, 20, 15, 10, or 5. In some embodiments, the ratio of the potency at the GLP-1 receptor divided by the potency at the glucagon receptor is about 1 or less than about 1 (e.g., about 0.01, 0.013, 0.0167, 0.02, 0.025, 0.03, 0.05, 0.067, 0.1, 0.2).

[0606] In yet another aspect, Class 2 glucagon related peptides exhibit activity at the GLP-1 and GIP receptors, but in which the glucagon activity has been significantly reduced or destroyed (“GIP/GLP-1 co-agonists”), e.g., by an amino acid modification at position 3. For example, substitution at this position with an acidic, basic, or a hydrophobic amino acid (glutamic acid, ornithine, norleucine) reduces glucagon activity. In some embodiments, the EC50 of the glucagon peptide at the GIP receptor is less than about 50-fold, 40-fold, 30-fold or 20-fold different (higher or lower) from its EC50 at the GLP-1 receptor. In some embodiments, the GIP potency of the Class 2 glucagon related peptide is less than about 25-, 20-, 15-, 10-, or 5-fold different (higher or lower) from its GLP-1 potency. In some embodiments these Class 2 glucagon related peptides have about 10% or less of the activity of native glucagon at the glucagon receptor, e.g. about 1-10%, or about 0.1-10%, or greater than about 0.1% but less than about 10%. In some embodiments, the ratio of the EC50 of the Class 2 glucagon related peptide at the GIP receptor divided by the EC50 of the Class 2 glucagon related peptide at the GLP-1 receptor is less than about 100, 75, 60, 50, 40, 30, 20, 15, 10, or 5, and no less than 1. In some embodiments, the ratio of the GIP potency of the Class 2 glucagon related peptide compared to the GLP-1 potency of the Class 2 glucagon related peptide is less than about 100, 75, 60, 50, 40, 30, 20, 15, 10, or 5, and no less than 1.

[0607] In a further aspect, Class 2 glucagon related peptides exhibit activity at the GIP receptor, in which the glucagon and GLP-1 activity have been significantly reduced or destroyed (“GIP agonist glucagon peptides”), e.g., by amino acid modifications at positions 3 with Glu and 7 with Ile. In some embodiments, these Class 2 glucagon related peptides have about 10% or less of the activity of native glucagon at the glucagon receptor, e.g. about 1-10%, or about 0.1-10%, or greater than about 0.1%, 0.5%, or 1% but less than about 1%, 5%, or 10%. In some embodiments these Class 2 glucagon related peptides also have about 10% or less of the activity of native GLP-1 at the GLP-1 receptor, e.g. about 1-10%, or about 0.1-10%, or greater than about 0.1%, 0.5%, or 1% but less than about 1%, 5%, or 10%.

[0608] In some embodiments, when the Class 2 glucagon related peptide is not pegylated, the EC50 of the Class 2 glucagon related peptide for GIP receptor activation is about 4, 2, 1 nM or less, or the analog has at least about 1%, 2%, 3%, 4% or 5% of the activity of native GIP at the GIP receptor. In related embodiments, the EC50 of the unpegylated Class 2 glucagon related peptide for GLP-1 receptor activation is about 4, 2, 1 nM or less or has at least about 1%, 2%, 3%, 4% or 5% of the activity of native GLP-1 at the GLP-1 receptor. In yet other related embodiments, the EC50 of the unpegylated Class 2 glucagon related peptide for glucagon receptor activation is about 4, 2, 1 nM or less, or at least about 5%, 10%, 15% or 20% of the activity of native glucagon at the glucagon receptor. In some embodiments, the unpegylated Class 2 glucagon related peptide has less than about 1% of the activity of native glucagon at the glucagon receptor. In other embodiments, the unpegylated Class 2 glucagon related peptide has less than about 10%, 5% or 1% of the activity of native GLP-1 at the GLP-1 receptor.

[0609] In embodiments where the Class 2 glucagon related peptides are linked to hydrophilic moieties such as PEG, the relative EC50s at one or more receptors may be higher e.g., about 10-fold higher. For example, the EC50 of a pegylated analog for GIP receptor activation is about 10 nM or less, or the Class 2 glucagon related peptide has at least about 0.1%, 0.2%, 0.3%, 0.4% or 0.5% of the activity of native GIP at the GIP receptor. In related embodiments, the EC50 of a pegylated Class 2 glucagon related peptide for GLP-1 receptor activation is about 10 nM or less or has at least about 0.1%, 0.2%, 0.3%, 0.4% or 0.5% of the activity of native GLP-1 at the GLP-1 receptor. In yet other related embodiments, the EC50 of a pegylated Class 2 glucagon related peptide for glucagon receptor activation is about 10 nM or less, or at least about 0.5%, 1%, 1.5% or 2% of the activity of native glucagon at the glucagon receptor. In some embodiments, the Class 2 glucagon related peptide has less than about 1% of the activity of native glucagon at the glucagon receptor. In other embodiments, the Class 2 glucagon related peptide has less than about 10%, 5% or 1% of the activity of native GLP-1 at the GLP-1 receptor.

[0610] Modifications

[0611] The modifications disclosed herein in reference to a Class 2 glucagon related peptide permit the manipulation of glucagon (SEQ ID NO: 1001) to create glucagon peptides that exhibit increased GIP activity, glucagon activity, and/or GLP-1 activity. Other modifications disclosed herein in reference to a Class 2 glucagon related peptide prolong the half-life, increase solubility, or increase stability of the resulting peptide. Yet other modifications disclosed herein in reference to a Class 2 glucagon related peptide have no effect on activity, or can be made without destroying the desired activity or activities. Any of the combinations in reference to a Class 2 glucagon related peptide that serve the same purpose (e.g. increasing GIP activity) can be applied individually or in combination. Any of the single or sets of combinations in reference to a Class 2 glucagon related peptide that confer enhanced properties can be applied individually or in combination, e.g. increased GIP and/or GLP-1 activity can be combined with increased half-life. In related embodiments, 1, 2, 3, 4, 5, 6 or more of the amino acid modifications may be non-conservative substitutions, additions or deletions. In some embodiments, 1, 2, 3, 4, 5, 6 or more of the amino acid modifications may be conservative substitutions.

[0612] Modifications that Affect GIP Activity

[0613] Enhanced activity at the GIP receptor is provided by an amino acid modification at position 1. For example, His at position 1 is substituted with a large, aromatic amino acid, optionally Tyr, Phe, Trp, amino-Phe, nitro-Phe, chloro-Phe, sulfo-Phe, 4-pyridyl-Ala, methyl-Tyr, or 3-amino Tyr. The combination of Tyr at position 1 with stabilization of the alpha helix within the region corresponding to amino acids 12-29 provided a Class 2 glucagon related peptide that activates the GIP receptor as well as the GLP-1 receptor and the glucagon receptor. The alpha helix structure can be stabilized by, e.g., formation of a covalent or non-covalent intramolecular bridge, or substitution and/or insertion of amino acids around positions 12-29 with an alpha helix-stabilizing amino acid (e.g., an α,α-disubstituted amino acid).

[0614] Enhanced activity at the GIP receptor is also provided by amino acid modifications at positions 27 and/or 28, and optionally at position 29. For example, the Met at position 27 is substituted with a large aliphatic amino acid, optionally Leu, the Asn at position 28 is substituted with a small aliphatic amino acid, optionally Ala, and the Thr at position 29 is substituted with a small aliphatic amino acid, optionally Gly. Substitution with LAG at positions 27-29 provides increased GIP activity relative to the native MNT sequence at those positions.

[0615] Enhanced activity at the GIP receptor is also provided by an amino acid modification at position 12. For example, position 12 is substituted with a large, aliphatic, nonpolar amino acid, optionally Ile.

[0616] Enhanced activity at the GIP receptor is also provided by an amino acid modification at positions 17 and/or 18. For example, position 17 is substituted with a polar residue, optionally Gln, and position 18 is substituted with a small aliphatic amino acid, optionally Ala. A substitution with QA at positions 17 and 18 provides increased GIP activity relative to the native RR sequence at those positions.

[0617] Increased activity at the GIP receptor is provided by modifications that permit formation of an intramolecular bridge between amino acid side chains at positions from 12 to 29. For example, an intramolecular bridge can be formed by a covalent bond between the side chains of two amino acids at positions i and i+4 or between positions j and j+3, or between positions k and k+7. In exemplary embodiments, the bridge is between positions 12 and 16, 16 and 20, 20 and 24, 24 and 28, or 17 and 20. In other embodiments, non-covalent interactions such as salt bridges can be formed between positively and negatively charged amino acids at these positions.

[0618] Any of the modifications described above which increase GIP receptor activity can be applied individually or in combination. Combinations of the modifications that increase GIP receptor activity generally provide higher GIP activity than any of such modifications taken alone.

[0619] Modifications that Affect Glucagon Activity

[0620] In some embodiments, enhanced glucagon potency is provided by an amino acid modification at position 16 of native glucagon (SEQ ID NO: 1001). By way of nonlimiting example, such enhanced potency can be provided by substituting the naturally occurring serine at position 16 with glutamic acid or with another negatively charged amino acid having a side chain with a length of 4 atoms, or alternatively with any one of glutamine, homoglutamic acid, or homocysteic acid, or a charged amino acid having a side chain containing at least one heteroatom, (e.g. N, O, S, P) and with a side chain length of about 4 (or 3-5) atoms. In some embodiments the glucagon peptide retains its original selectivity for the glucagon receptor relative to the GLP-1 receptors.

[0621] Glucagon receptor activity can be reduced by an amino acid modification at position 3, e.g. substitution of the naturally occurring glutamine at position 3, with an acidic, basic, or a hydrophobic amino acid. For example substitution at position 3 with glutamic acid, ornithine, or norleucine substantially reduces or destroys glucagon receptor activity.

[0622] Maintained or enhanced activity at the glucagon receptor may be achieved by modifying the Gln at position 3 with a glutamine analog, as described herein. For example, glucagon agonists can comprise the amino acid sequence of any of SEQ ID NOs: 1243-1248, 1250, 1251, and 1253-1256.

[0623] Restoration of glucagon activity which has been reduced by amino acid modifications at positions 1 and 2 is provided by modifications that that stabilize the alpha helix structure of the C-terminal portion (amino acids 12-29) of the glucagon peptide or analog thereof. For example, an intramolecular bridge can be formed by a covalent bond between the side chains of two amino acids at positions i and i+4 or between positions j and j+3, or between positions k and k+7. In other embodiments, non-covalent interactions such as salt bridges can be formed between positively and negatively charged amino acids at these positions. In yet other embodiments, one or more α,α-disubstituted amino acids are inserted or substituted into this C-terminal portion (amino acids 12-29) at positions that retain the desired activity. For example, one, two, three or all of positions 16, 20, 21 or 24 are substituted with an α,α-disubstituted amino acid, e.g., AIB.

[0624] Modifications that Affect GLP-1 Activity

[0625] Enhanced activity at the GLP-1 receptor is provided by replacing the carboxylic acid of the C-terminal amino acid with a charge-neutral group, such as an amide or ester.

[0626] Enhanced activity at the GLP-1 receptor is also provided by stabilizing the alpha-helix structure in the C-terminal portion of glucagon (around amino acids 12-29), e.g., through formation of an intramolecular bridge between the side chains of two amino acids, or substitution and/or insertion of amino acids around positions 12-29 with an alpha helix-stabilizing amino acid (e.g., an α,α-disubstituted amino acid), as further described herein. In exemplary embodiments, the side chains of the amino acid pairs 12 and 16, 13 and 17, 16 and 20, 17 and 21, 20 and 24 or 24 and 28 (amino acid pairs in which i=12, 16, 20, or 24) are linked to one another and thus stabilize the glucagon alpha helix. In some embodiments, the bridge or linker is about 8 (or about 7-9) atoms in length, particularly when the bridge is between positions i and i+4. In some embodiments, the bridge or linker is about 6 (or about 5-7) atoms in length, particularly when the bridge is between positions j and j+3.

[0627] In some embodiments, intramolecular bridges are formed by (a) substituting the naturally occurring serine at position 16 with glutamic acid or with another negatively charged amino acid having a side chain with a length of 4 atoms, or alternatively with any one of glutamine, homoglutamic acid, or homocysteic acid, or a charged amino acid having a side chain containing at least one heteroatom, (e.g. N, O, S, P) and with a side chain length of about 4 (or 3-5) atoms, and (b) substituting the naturally occurring glutamine at position 20 with another hydrophilic amino acid having a side chain that is either charged or has an ability to hydrogen-bond, and is at least about 5 (or about 4-6) atoms in length, for example, lysine, citrulline, arginine, or ornithine. The side chains of such amino acids at positions 16 and 20 can form a salt bridge or can be covalently linked. In some embodiments the two amino acids are bound to one another to form a lactam ring.

[0628] In some embodiments, stabilization of the alpha helix structure in the C-terminal portion of the glucagon peptide is achieved through the formation of an intramolecular bridge other than a lactam bridge. For example, suitable covalent bonding methods include any one or more of olefin metathesis, lanthionine-based cyclization, disulfide bridge or modified sulfur-containing bridge formation, the use of α, ω-diaminoalkane tethers, the formation of metal-atom bridges, and other means of peptide cyclization are used to stabilize the alpha helix.

[0629] In yet other embodiments, one or more α,α-disubstituted amino acids are inserted or substituted into this C-terminal portion (amino acids 12-29) at positions that retain the desired activity. For example, one, two, three or all of positions 16, 20, 21 or 24 are substituted with an α,α-disubstituted amino acid, e.g., AIB.

[0630] Increased activity at the GLP-1 receptor is provided by an amino acid modification at position 20 as described herein.

[0631] Increased activity at the GLP-1 receptor is provided by adding GPSSGAPPPS (SEQ ID NO: 1095) or XGPSSGAPPPS (SEQ ID NO: 1096) to the C-terminus. GLP-1 activity in such analogs can be further increased by modifying the amino acid at position 18, 28 or 29, or at position 18 and 29, as described herein.

[0632] A further modest increase in GLP-1 potency is provided by modifying the amino acid at position 10 to be a large, aromatic amino acid residue, optionally Trp.

[0633] Reduced activity at the GLP-1 receptor is provided, e.g., by an amino acid modification at position 7 as described herein.

[0634] Potency at the GLP-1 receptor can be further enhanced by an alanine substitution for the native arginine at position 18.

[0635] Any of the modifications described above in reference to a Class 2 glucagon related peptide which increase GLP-1 receptor activity can be applied individually or in combination. Combinations of the modifications that increase GLP-1 receptor activity generally provide higher GLP-1 activity than any of such modifications taken alone. For example, the invention provides glucagon peptides that comprise modifications at position 16, at position 20, and at the C-terminal carboxylic acid group, optionally with a covalent bond between the amino acids at positions 16 and 20; glucagon peptides that comprise modifications at position 16 and at the C-terminal carboxylic acid group; glucagon peptides that comprise modifications at positions 16 and 20, optionally with a covalent bond between the amino acids at positions 16 and 20; and glucagon peptides that comprise modifications at position 20 and at the C-terminal carboxylic acid group.

[0636] Modifications that Improve DPP-IV Resistance

[0637] Modifications at position 1 and/or 2 can increase the peptide's resistance to dipeptidyl peptidase IV (DPP IV) cleavage. For example, position 1 and/or position 2 may be substituted with a DPP-IV resistant amino acid as described herein. In some embodiments, the amino acid at position 2 is substituted with N-methyl alanine.

[0638] It was observed that modifications at position 2 (e.g. AIB at position 2) and in some cases modifications at position 1 (e.g., DMIA at position 1) may reduce glucagon activity, sometimes significantly; surprisingly, this reduction in glucagon activity can be restored by stabilizing the alpha-helix structure in the C-terminal portion of glucagon (around amino acids 12-29), e.g., through formation of a covalent bond between the side chains of two amino acids, as described herein. In some embodiments, the covalent bond is between amino acids at positions “i” and “i+4”, or positions “j” and “j+3”, e.g., between positions 12 and 16, 16 and 20, 20 and 24, 24 and 28, or 17 and 20. In exemplary embodiments, this covalent bond is a lactam bridge between a glutamic acid at position 16 and a lysine at position 20. In some embodiments, this covalent bond is an intramolecular bridge other than a lactam bridge, as described herein.

[0639] Modifications that Reduce Degradation

[0640] In yet further exemplary embodiments, any of the Class 2 glucagon related peptides can be further modified to improve stability by modifying the amino acid at position 15 and/or 16 of SEQ ID NO: 1001 to reduce degradation of the peptide over time, especially in acidic or alkaline buffers. Such modifications reduce cleavage of the Asp15-Ser16 peptide bond. In exemplary embodiments, the amino acid modification at position 15 is a deletion or substitution of Asp with glutamic acid, homoglutamic acid, cysteic acid or homocysteic acid. In other exemplary embodiments, the amino acid modification at position 16 is a deletion or substitution of Ser with Thr or AIB. In other exemplary embodiments, Ser at position 16 is substituted with glutamic acid or with another negatively charged amino acid having a side chain with a length of 4 atoms, or alternatively with any one of glutamine, homoglutamic acid, or homocysteic acid.

[0641] In some embodiments, the methionine residue present at position 27 of the native peptide is modified, e.g. by deletion or substitution. Such modifications may prevent oxidative degradation of the peptide. In some embodiments, the Met at position 27 is substituted with leucine, isoleucine or norleucine. In some specific embodiments, Met at position 27 is substituted with leucine or norleucine.

[0642] In some embodiments, the Gln at position 20 and/or 24 is modified, e.g. by deletion or substitution. Such modifications can reduce degradation that occurs through deamidation of Gln. In some embodiments, the Gln at position 20 and/or 24 is substituted with Ser, Thr, Ala or AIB. In some embodiments the Gln at position 20 and/or 24 is substituted with Lys, Arg, Orn, or Citrulline.

[0643] In some embodiments, the Asp at position 21 is modified, e.g. by deletion or substitution. Such modifications can reduce degradation that occurs through dehydration of Asp to form a cyclic succinimide intermediate followed by isomerization to iso-aspartate. In some embodiments, position 21 is substituted with Glu, homoglutamic acid or homocysteic acid. In some specific embodiments, position 21 is substituted with Glu.

[0644] Stabilization of the Alpha Helix Structure

[0645] Stabilization of the alpha-helix structure in the C-terminal portion of the Class 2 glucagon related peptide (around amino acids 12-29) provides enhanced GLP-1 and/or GIP activity and restores glucagon activity which has been reduced by amino acid modifications at positions 1 and/or 2. The alpha helix structure can be stabilized by, e.g., formation of a covalent or non-covalent intramolecular bridge, or substitution and/or insertion of amino acids around positions 12-29 with an alpha helix-stabilizing amino acid (e.g., an α,α-disubstituted amino acid). Stabilization of the alpha-helix structure of a GIP agonist may be accomplished as described herein.

### Acylation and Alkylation

[0646] In accordance with some embodiments, the glucagon peptides disclosed herein are modified to comprise an acyl group or alkyl group, e.g., an acyl or alkyl group which is non-native to a naturally-occurring amino acid as described herein. Acylation or alkylation can increase the half-life of the glucagon peptides in circulation. Acylation or alkylation can advantageously delay the onset of action and/or extend the duration of action at the glucagon and/or GLP-1 receptors and/or improve resistance to proteases such as DPP-IV and/or improve solubility. Activity at the glucagon and/or GLP-1 and/or GIP receptors of the glucagon peptide may be maintained after acylation. In some embodiments, the potency of the acylated glucagon peptides is comparable to the unacylated versions of the glucagon peptides. Class 2 glucagon related peptides may be acylated or alkylated at the same amino acid position where a hydrophilic moiety is linked, or at a different amino acid position, as described herein.

[0647] In some embodiments, the invention provides a glucagon peptide modified to comprise an acyl group or alkyl group covalently linked to the amino acid at position 10 of the glucagon peptide. The glucagon peptide may further comprise a spacer between the amino acid at position 10 of the glucagon peptide and the acyl group or alkyl group. In some embodiments, the acyl group is a fatty acid or bile acid, or salt thereof, e.g. a C4 to C30 fatty acid, a C8 to C24 fatty acid, cholic acid, a C4 to C30 alkyl, a C8 to C24 alkyl, or an alkyl comprising a steroid moiety of a bile acid. The spacer is any moiety with suitable reactive groups for attaching acyl or alkyl groups. In exemplary embodiments, the spacer comprises an amino acid, a dipeptide, a tripeptide, a hydrophilic bifunctional, or a hydrophobic bifunctional spacer. In some embodiments, the spacer is selected from the group consisting of: Trp, Glu, Asp, Cys and a spacer comprising NH₂(CH₂CH₂O)n(CH₂)mCOOH, wherein m is any integer from 1 to 6 and n is any integer from 2 to 12. Such acylated or alkylated glucagon peptides may also further comprise a hydrophilic moiety, optionally a polyethylene glycol. Any of the foregoing glucagon peptides may comprise two acyl groups or two alkyl groups, or a combination thereof.

[0648] Conjugates and Fusions

[0649] The GIP agonist can be linked, optionally via covalent bonding and optionally via a linker, to a conjugate moiety as described herein.

[0650] In other embodiments, the second peptide is XGPSSGAPPPS (SEQ ID NO: 1096), wherein X is selected from one of the 20 common amino acids, e.g., glutamic acid, aspartic acid or glycine. In some embodiments X represents an amino acid, for example Cys, that further comprises a hydrophilic moiety covalently linked to the side chain of that amino acid. Such C-terminal extensions improve solubility and also can improve GIP or GLP-1 activity. In some embodiments wherein the glucagon peptide further comprises a carboxy terminal extension, the carboxy terminal amino acid of the extension ends in an amide group or an ester group rather than a carboxylic acid.

[0651] In some embodiments, e.g., in glucagon peptides which comprise the C-terminal extension, the threonine at position 29 of the native glucagon peptide is replaced with a glycine. For example, a glucagon peptide having a glycine substitution for threonine at position 29 and comprising the C-terminal extension of GPSSGAPPPS (SEQ ID NO: 1095) is four times as potent at the GLP-1 receptor as native glucagon modified to comprise the same C-terminal extension. This T29G substitution can be used in conjunction with other modifications disclosed herein to enhance the affinity of the glucagon peptides for the GLP-1 receptor. For example, the T29G substitution can be combined with the S16E and N20K amino acid substitutions, optionally with a lactam bridge between amino acids 16 and 20, and optionally with addition of a PEG chain as described herein.

[0652] In some embodiments an amino acid is added to the C-terminus, and the additional amino acid is selected from the group consisting of glutamic acid, aspartic acid and glycine.

[0653] Modifications that Enhance Solubility

[0654] In another embodiment, the solubility of any of the glucagon peptides can be improved by amino acid substitutions and/or additions that introduce a charged amino acid into the C-terminal portion of the peptide, preferably at a position C-terminal to position 27 of SEQ ID NO: 1001. Optionally, one, two or three charged amino acids may be introduced within the C-terminal portion, preferably C-terminal to position 27. In some embodiments the native amino acid(s) at positions 28 and/or 29 are substituted with one or two charged amino acids, and/or in a further embodiment one to three charged amino acids are also added to the C-terminus of the peptide. In exemplary embodiments, one, two or all of the charged amino acids are negatively charged. In some embodiments, the negatively charged (acidic amino acid) is aspartic acid or glutamic acid.

[0655] Additional modifications, e.g. conservative substitutions, may be made to the glucagon peptide that still allow it to retain GIP activity (and optionally GLP-1 activity and/or glucagon activity).

[0656] Other Modifications

[0657] Any of the modifications described above in reference to a Class 2 peptide which increase or decrease GIP activity, which increase or decrease glucagon receptor activity, and which increase GLP-1 receptor activity can be applied individually or in combination. Any of the modifications described above in reference to a Class 2 glucagon related peptide can also be combined with other modifications that confer other desirable properties, such as increased solubility and/or stability and/or duration of action, as described herein with regard to Class 2 glucagon related peptides. Alternatively, any of the modifications described above in reference to Class 2 glucaton related peptides can be combined with other modifications described herein in reference to Class 2 glucagon related peptides that do not substantially affect solubility or stability or activity. Exemplary modifications include but are not limited to:

[0658] (A) Improving solubility, for example, by introducing one, two, three or more charged amino acid(s) to the C-terminal portion of native glucagon, preferably at a position C-terminal to position 27. Such a charged amino acid can be introduced by substituting a native amino acid with a charged amino acid, e.g. at positions 28 or 29, or alternatively by adding a charged amino acid, e.g. after position 27, 28 or 29. In exemplary embodiments, one, two, three or all of the charged amino acids are negatively charged. In other embodiments, one, two, three or all of the charged amino acids are positively charged. Such modifications increase solubility, e.g. provide at least 2-fold, 5-fold, 10-fold, 15-fold, 25-fold, 30-fold or greater solubility relative to native glucagon at a given pH between about 5.5 and 8, e.g., pH 7, when measured after 24 hours at 25° C.

[0659] (B) Increasing solubility and duration of action or half-life in circulation by addition of a hydrophilic moiety such as a polyethylene glycol chain, as described herein, e.g. at position 16, 17, 20, 21, 24 or 29, within a C-terminal extension, or at the C-terminal amino acid of the peptide,

[0660] (C) Increasing solubility and/or duration of action or half-life in circulation and/or delaying the onset of action by acylation or alkylation of the glucagon peptide, as described herein;

[0661] (D) Increasing duration of action or half-life in circulation through introducing resistance to dipeptidyl peptidase IV (DPP IV) cleavage by modification of the amino acid at position 1 or 2 as described herein.

[0662] (E) Increasing stability by modification of the Asp at position 15, for example, by deletion or substitution with glutamic acid, homoglutamic acid, cysteic acid or homocysteic acid. Such modifications can reduce degradation or cleavage at a pH within the range of 5.5 to 8, for example, retaining at least 75%, 80%, 90%, 95%, 96%, 97%, 98% or 99%, up to 100% of the original peptide after 24 hours at 25° C. Such modifications reduce cleavage of the peptide bond between Asp15-Ser16.

[0663] (F) Increasing stability by modification of the Ser at position 16, for example by substitution with Thr or AIB. Such modifications also reduce cleavage of the peptide bond between Asp15-Ser16.

[0664] (G) Increasing stability by modification of the methionine at position 27, for example, by substitution with leucine or norleucine. Such modifications can reduce oxidative degradation. Stability can also be increased by modification of the Gln at position 20 or 24, e.g. by substitution with Ser, Thr, Ala or AIB. Such modifications can reduce degradation that occurs through deamidation of Gln. Stability can be increased by modification of Asp at position 21, e.g. by substitution with Glu. Such modifications can reduce degradation that occurs through dehydration of Asp to form a cyclic succinimide intermediate followed by isomerization to iso-aspartate.

[0665] (H) Non-conservative or conservative substitutions, additions or deletions that do not substantially affect activity, for example, conservative substitutions at one or more of positions 2, 5, 9, 10, 11, 12, 13, 14, 15, 16, 17, 18, 19, 20, 21, 24, 27, 28 or 29; substitution of one or more of these positions with Ala; deletion of amino acids at one or more of positions 27, 28 or 29; or deletion of amino acid 29 optionally combined with a C-terminal amide or ester in place of the C-terminal carboxylic acid group; substitution of Lys at position 12 with Arg; substitution of Tyr at position 10 with Val or Phe;

[0666] Preservation of activity after pegylation is provided by the addition of GPSSGAPPPS (SEQ ID NO: 1095) to the C-terminus.

[0667] Some positions of the native glucagon peptide can be modified while retaining at least some of the activities of the parent peptide. Accordingly, applicants anticipate that one or more of the amino acids located at positions at positions 2, 5, 10, 11, 12, 13, 14, 17, 18, 19, 20, 21, 24, 27, 28 or 29 can be substituted with an amino acid different from that present in the native glucagon peptide, and still retain activity at the glucagon receptor.

[0668] In some embodiments, position 18 is substituted with an amino acid selected from the group consisting of Ala, Ser, or Thr. In some embodiments the amino acid at position 20 is substituted with Ser, Thr, Lys, Arg, Orn, Citrulline or AIB. In some embodiments, position 21 is substituted with Glu, homoglutamic acid or homocysteic acid. In some embodiments, the glucagon peptide comprises 1 to 10 amino acid modifications selected from positions 16, 17, 18, 20, 21, 23, 24, 27, 28 and 29. In exemplary embodiments, the modifications are one or more amino acid substitutions selected from the group consisting of Gln17, Ala18, Glu21, Ile23, Ala24, Val27 and Gly29. In some embodiments, 1 to 2 amino acids selected from positions 17-26 differ from the parent peptide. In other embodiments, 1 to 2 amino acids selected from positions 17-22 differ from the parent peptide. In yet other embodiments, the modifications are Gln17, Ala18, Glu21, Ile23 and Ala24.

[0669] In some embodiments, one or more amino acids is added to the carboxy terminus of the glucagon peptide. The amino acid is typically selected from one of the 20 common amino acids, and in some embodiments the amino acid has an amide group in place of the carboxylic acid of the native amino acid. In exemplary embodiments the added amino acid is selected from the group consisting of glutamic acid and aspartic acid and glycine.

[0670] Other modifications that do not destroy activity include W10 or R20.

[0671] In some embodiments, the Class 2 glucagon related peptides disclosed herein are modified by truncation of the C-terminus by one or two amino acid residues yet retain similar activity and potency at the glucagon, GLP-1 and/or GIP receptors. In this regard, the amino acid at position 29 and/or 28 can be deleted.

[0672] Exemplary Embodiments

[0673] In accordance with some embodiments of the invention, the analog of glucagon (SEQ ID NO: 1001) having GIP agonist activity comprises SEQ ID NO: 1001 with (a) an amino acid modification at position 1 that confers GIP agonist activity, (b) a modification which stabilizes the alpha helix structure of the C-terminal portion (amino acids 12-29) of the analog, and (c) optionally, 1 to 10 (e.g., 1, 2, 3, 4, 5, 6, 7, 8, 9, 10) further amino acid modifications. In some embodiments, the analog exhibits at least about 1% activity of native GIP at the GIP receptor or any other activity level at the GIP receptor described herein.

[0674] In certain embodiments, the modification which stabilizes the alpha helix structure is one which provides or introduces an intramolecular bridge, including, for example, a covalent intramolecular bridge, such as any of those described herein. The covalent intramolecular bridge in some embodiments is a lactam bridge. The lactam bridge of the analog of these embodiments can be a lactam bridge as described herein. See, e.g., the teachings of lactam bridges under the section “Stabilization of the Alpha Helix Structure.” For example, the lactam bridge may be one which is between the side chains of amino acids at positions i and i+4 or between the side chains of amino acids at positions j and j+3, wherein i is 12, 13, 16, 17, 20 or 24, and wherein j is 17. In certain embodiments, the lactam bridge can be between the amino acids at positions 16 and 20, wherein one of the amino acids at positions 16 and 20 is substituted with Glu and the other of the amino acids at positions 16 and 20 is substituted with Lys.

[0675] In alternative embodiments, the modification which stabilizes the alpha helix structure is the introduction of one, two, three, or four α,α-disubstituted amino acids at position(s) 16, 20, 21, and 24 of the analog. In some embodiments, the α,α-disubstituted amino acid is AIB. In certain aspects, the α,α-disubstituted amino acid (e.g., AIB) is at position 20 and the amino acid at position 16 is substituted with a positive-charged amino acid, such as, for example, an amino acid of Formula IV, which is described herein. The amino acid of Formula IV may be homoLys, Lys, Orn, or 2,4-diaminobutyric acid (Dab).

[0676] In specific aspects of the invention, the amino acid modification at position 1 is a substitution of His with an amino acid lacking an imidazole side chain, e.g. a large, aromatic amino acid (e.g., Tyr).

[0677] In certain aspects, the analog of glucagon comprises amino acid modifications at one, two or all of positions 27, 28 and 29. For example, the Met at position 27 can be substituted with a large aliphatic amino acid, optionally Leu, the Asn at position 28 can be substituted with a small aliphatic amino acid, optionally Ala, the Thr at position 29 can be substituted with a small aliphatic amino acid, optionally Gly, or a combination of two or three of the foregoing. In specific embodiments, the analog of glucagon comprises Leu at position 27, Ala at position 28, and Gly or Thr at position 29.

[0678] In certain embodiments of the invention, the analog of glucagon comprises an extension of 1 to 21 amino acids C-terminal to the amino acid at position 29. The extension can comprise the amino acid sequence of SEQ ID NO: 1095 or 1096, for instance. Additionally or alternatively, the analog of glucagon can comprise an extension of which 1-6 amino acids of the extension are positive-charged amino acids. The positive-charged amino acids may be amino acids of Formula IV, including, but not limited to Lys, homoLys, Orn, and Dab.

[0679] The analog of glucagon in some embodiments is acylated or alkylated as described herein. For instance, the acyl or alkyl group may be attached to the analog of glucagon, with or without a spacer, at position 10 or 40 of the analog, as further described herein. The analog may additionally or alternatively be modified to comprise a hydrophilic moiety as further described herein. Furthermore, in some embodiments, the analog comprises any one or a combination of the following modifications:
[0680] (a) Ser at position 2 substituted with D-Ser, Ala, D-Ala, Gly, N-methyl-Ser, AIB, Val, or α-amino-N-butyric acid;
[0681] (b) Tyr at position 10 substituted with Trp, Lys, Orn, Glu, Phe, or Val:
[0682] (c) Linkage of an acyl group to a Lys at position 10;
[0683] (d) Lys at position 12 substituted with Arg or Be;
[0684] (e) Ser at position 16 substituted with Glu, Gln, homoglutamic acid, homocysteic acid, Thr, Gly, or AIB;
[0685] (f) Arg at position 17 substituted with Gln;
[0686] (g) Arg at position 18 substituted with Ala, Ser, Thr, or Gly;
[0687] (h) Gln at position 20 substituted with Ser, Thr, Ala, Lys, Citrulline, Arg, Orn, or AIB;
[0688] (i) Asp at position 21 substituted with Glu, homoglutamic acid, homocysteic acid;
[0689] (j) Val at position 23 substituted with Ile;
[0690] (k) Gln at position 24 substituted with Asn, Ser, Thr, Ala, or AIB;
[0691] (l) and a conservative substitution at any of positions 2 5, 9, 10, 11, 12. 13, 14, 15, 16, 8 19 20, 21. 24, 27, 28, and 29.

[0692] In exemplary embodiments, the analog of glucagon (SEQ ID NO: 1001) having GIP agonist activity comprises the following modifications:
[0693] (a) an amino acid modification at position 1 that confers GIP agonist activity,
[0694] (b) a lactam bridge between the side chains of amino acids at positions i and i+4 or between the side chains of amino acids at positions j and j+3, wherein i is 12, 13, 16, 17, 20 or 24, and wherein j is 17,
[0695] (c) amino acid modifications at one, two or all of positions 27, 28 and 29, e.g., amino acid modifications at position 27 and/or 28, and
[0696] (d) 1-9 or 1-6 further amino acid modifications, e.g. 1, 2, 3, 4, 5, 6, 7, 8 or 9 further amino acid modifications,
   and the EC50 of the analog for GIP receptor activation is about 10 nM or less.

[0697] The lactam bridge of the analog of these embodiments can be a lactam bridge as described herein. See, e.g., the teachings of lactam bridges under the section “Stabilization of the Alpha Helix Structure.” For example, the lactam bridge can be between the amino acids at positions 16 and 20, wherein one of the amino acids at positions 16 and 20 is substituted with Glu and the other of the amino acids at positions 16 and 20 is substituted with Lys.

[0698] In accordance with these embodiments, the analog can comprise, for example, the amino acid sequence of any of SEQ ID NOs: 1005-1094.

[0699] In other exemplary embodiments, the analog of glucagon (SEQ ID NO: 1001) having GIP agonist activity comprises the following modifications:
[0700] (a) an amino acid modification at position 1 that confers GIP agonist activity,
[0701] (b) one, two, three, or all of the amino acids at positions 16, 20, 21, and 24 of the analog is substituted with an α,α-disubstituted amino acid,
[0702] (c) amino acid modifications at one, two or all of positions 27, 28 and 29, e.g., amino acid modifications at position 27 and/or 28, and
[0703] (d) 1-9 or 1-6 further amino acid modifications, e.g. 1, 2, 3, 4, 5, 6, 7, 8 or 9 further amino acid modifications,
   and the EC50 of the analog for GIP receptor activation is about 10 nM or less.

[0704] The α,α-disubstituted amino acid of the analog of these embodiments can be any α,α-disubstituted amino acid, including, but not limited to, amino iso-butyric acid (AIB), an amino acid disubstituted with the same or a different group selected from methyl, ethyl, propyl, and n-butyl, or with a cyclooctane or cycloheptane (e.g., 1-aminocyclooctane-1-carboxylic acid). In certain embodiments, the α,α-disubstituted amino acid is AIB. In certain embodiments, the amino acid at position 20 is substituted with an α,α-disubstituted amino acid, e.g., AIB.

[0705] In accordance with these embodiments, the analog can comprise, for example, the amino acid sequence of any of SEQ ID NOs: 1099-1141, 1144-1164, 1166-1169, and 1173-1178.

[0706] In yet other exemplary embodiments, the analog of glucagon (SEQ ID NO: 1001) having GIP agonist activity comprises the following modifications:
[0707] (a) an amino acid modification at position 1 that confers GIP agonist activity,
[0708] (b) an amino acid substitution of Ser at position 16 with an amino acid of Formula IV:

[chemical structure]

[0709] wherein n is 1 to 16, or 1 to 10, or 1 to 7, or 1 to 6, or 2 to 6, each of R₁ and R₂ is independently selected from the group consisting of H, C₁-C₁₈ alkyl, (C₁-C₁₈ alkyl)OH, (C₁-C₁₈ alkyl)NH₂, (C₁-C₁₈ alkyl)SH, (C₀-C₄ alkyl)(C₃-C₆)cycloalkyl, (C₀-C₄ alkyl)(C₂-C₅ heterocyclic), (C₀-C₄ alkyl)(C₆-C₁₀ aryl)R₇, and (C₁-C₄ alkyl)(C₃-C₉ heteroaryl), wherein R₇ is H or OH, and the side chain of the amino acid of Formula IV comprises a free amino group,
[0710] (c) an amino acid substitution of the Gln at position 20 with an alpha, alpha-disubstituted amino acid,
[0711] (d) amino acid modifications at one, two or all of positions 27, 28 and 29, e.g., amino acid modifications at position 27 and/or 28, and
[0712] (e) 1-9 or 1-6 further amino acid modifications, e.g. 1, 2, 3, 4, 5, 6, 7, 8 or 9 further amino acid modifications,
   and the EC50 of the analog for GIP receptor activation is about 10 nM or less.

[0713] The amino acid of Formula IV of the analog of these embodiments may be any amino acid, such as, for example, the amino acid of Formula IV, wherein n is 1, 2, 3, 4, 5, 6, 7, 8, 9, 10, 11, 12, 13, 14, 15, or 16. In certain embodiments, n is 2, 3, 4, or 5, in which case, the amino acid is Dab, Orn, Lys, or homoLys respectively.

[0714] The alpha, alpha-disubstituted amino acid of the analog of these embodiments may be any alpha, alpha-disubstituted amino acid, including, but not limited to, amino iso-butyric acid (AIB), an amino acid disubstituted with the same or a different group selected from methyl, ethyl, propyl, and n-butyl, or with a cyclooctane or cycloheptane (e.g., 1-aminocyclooctane-1-carboxylic acid). In certain embodiments, the alpha, alpha-disubstituted amino acid is AIB.

[0715] In accordance with these embodiments, the analog can comprise, for example, the amino acid sequence of any of SEQ ID NOs: 1099-1165.

[0716] In yet other exemplary embodiments, the analog of glucagon (SEQ ID NO: 1001) having GIP agonist activity comprises:
[0717] (a) an amino acid modification at position 1 that confers GIP agonist activity, and
[0718] (b) an extension of about 1 to about 21 amino acids C-terminal to the amino acid at position 29, wherein at least one of the amino acids of the extension is acylated or alkylated,
   wherein the EC50 of the analog for GIP receptor activation is about 10 nM or less.

[0719] In some embodiments, the acylated or alkylated amino acid is an amino acid of Formula I, II, or III. In more specific embodiments, the amino acid of Formula I is Dab, Orn, Lys, or homoLys. Also, in some embodiments, the extension of about 1 to about 21 amino acids comprises the amino acid sequence of GPSSGAPPPS (SEQ ID NO: 1095) or XGPSSGAPPPS (SEQ ID NO: 1096), wherein X is any amino acid, or GPSSGAPPPK (SEQ ID NO: 1170) or XGPSSGAPPPK (SEQ ID NO: 1171) or XGPSSGAPPPSK (SEQ ID NO: 1172), wherein X is Gly or a small, aliphatic or non-polar or slightly polar amino acid. In some embodiments, the about 1 to about 21 amino acids may comprise sequences containing one or more conservative substitutions relative to SEQ ID NO: 1095, 1096, 1170, 1171 or 1172. In some embodiments, the acylated or alkylated amino acid is located at position 37, 38, 39, 40, 41, 42, or 43 of the C-terminally-extended analog. In certain embodiments, the acylated or alkylated amino acid is located at position 40 of the C-terminally extended analog.

[0720] In some embodiments, the analog having GIP agonist activity further comprises amino acid modifications at one, two or all of positions 27, 28 and 29, e.g., amino acid modifications at position 27 and/or 28.

[0721] In any of the above exemplary embodiments, the amino acid modification at position 1 that confers GIP agonist activity can be a substitution of His with an amino acid lacking an imidazole side chain. The amino acid modification at position 1 can, for example, be a substitution of His with a large, aromatic amino acid. In some embodiments, the large, aromatic amino acid is any of those described herein, including, for example, Tyr.

[0722] Also, with regard to the above exemplary embodiments, amino acid modifications at one, two, or all of positions 27, 28, and 29 can be any of the modifications at these positions described herein. For example, the Met at position 27 can be substituted with a large aliphatic amino acid, optionally Leu, the Asn at position 28 can be substituted with a small aliphatic amino acid, optionally Ala, and/or the Thr at position 29 can be substituted with a small aliphatic amino acid, optionally Gly. Alternatively, the analog can comprise such amino acid modifications at position 27 and/or 28.

[0723] The analog of the above exemplary embodiments can further comprise 1-9 or 1-6 further, additional amino acid modifications, e.g. 1, 2, 3, 4, 5, 6, 7, 8 or 9 further amino acid modifications, such as, for example, any of the modifications described herein which increase or decrease the activity at any of the GIP, GLP-1, and glucagon receptors, improve solubility, improve duration of action or half-life in circulation, delay the onset of action, or increase stability. The analog can further comprise, for example, an amino acid modification at position 12, optionally, a substitution with Be, and/or amino acid modifications at positions 17 and 18, optionally substitution with Q at position 17 and A at position 18, and/or an addition of GPSSGAPPPS (SEQ ID NO: 1095) or XGPSSGAPPPS (SEQ ID NO: 1096), or sequences containing one or more conservative substitutions relative to SEQ ID NO: 1095 or 1096, to the C-terminus. The analog can comprise one or more of the following modifications:
[0724] (i) Ser at position 2 substituted with D-Ser, Ala, D-Ala, Gly, N-methyl-Ser, AIB, Val, or α-amino-N-butyric acid;
[0725] (ii) Tyr at position 10 substituted with Trp, Lys, Orn, Glu, Phe, or Val;
[0726] (iii) Linkage of an acyl group to a Lys at position 10;
[0727] (iv) Lys at position 12 substituted with Arg;
[0728] (v) Ser at position 16 substituted with Glu, Gln, homoglutamic acid, homocysteic acid, Thr, Gly, or AIB;
[0729] (vi) Arg at position 17 substituted with Gln;
[0730] (vii) Arg at position 18 substituted with Ala, Ser, Thr, or Gly;
[0731] (viii) Gln at position 20 substituted with Ala, Ser, Thr, Lys, Citrulline, Arg, Orn, or AIB;
[0732] (ix) Asp at position 21 substituted with Glu, homoglutamic acid, homocysteic acid;
[0733] (x) Val at position 23 substituted with Ile;
[0734] (xi) Gln at position 24 substituted with Asn, Ala, Ser, Thr, or AIB; and
[0735] (xii) a conservative substitution at any of positions 2, 5, 9, 10, 11, 12, 13, 14, 15, 16, 17, 18, 19, 20, 21, 24, 27, 28, and 29.
   The analog in some embodiments comprise a combination of the modifications (i) through (xii). Alternatively or additionally, the analog can comprise an amino acid modification at position 3 (e.g., an amino acid substitution of Gln with Glu), wherein the analog has less than 1% of the activity of glucagon at the glucagon receptor. Alternatively or additionally, the analog can comprise an amino acid modification at position 7 (e.g., an amino acid substitution of Thr with an amino acid lacking a hydroxyl group, e.g., Abu or Ile), wherein the analog has less than about 10% of the activity of GLP-1 at the GLP-1 receptor.

[0736] With regard to the exemplary embodiments, the analog can be covalently linked to a hydrophilic moiety. In some embodiments, the analog is covalently linked to the hydrophilic moiety at any of amino acid positions 16, 17, 20, 21, 24, 29, 40, or the C-terminus. In certain embodiments, the analog comprises a C-terminal extension (e.g., an amino acid sequence of SEQ ID NO: 1095) and an addition of an amino acid comprising the hydrophilic moiety, such that the hydrophilic moiety is covalently linked to the analog at position 40.

[0737] In some embodiments, the hydrophilic moiety is covalently linked to a Lys, Cys, Orn, homocysteine, or acetyl-phenylalanine of the analog. The Lys, Cys, Orn, homocysteine, or acetyl-phenylalanine may be an amino acid that is native to the glucagon sequence (SEQ ID NO: 1001) or it may be an amino acid which is replacing a native amino acid of SEQ ID NO: 1001. In some embodiments, wherein the hydrophilic moiety is attached to a Cys, the linkage to the hydrophilic moiety can comprise the structure

[chemical structure]

[0738] With regard to the analogs comprising a hydrophilic moiety, the hydrophilic moiety may be any of those described herein. See, e.g., the teachings under the section “Linkage of hydrophilic moieties.” In some embodiments, the hydrophilic moiety is a polyethylene glycol (PEG). The PEG in certain embodiments has a molecular weight of about 1,000 Daltons to about 40,000 Daltons, e.g., about 20,000 Daltons to about 40,000 Daltons.

[0739] With regard to the exemplary embodiments, the analog can comprise a modified amino acid in which the side chain is covalently linked to an acyl or alkyl group (e.g., an acyl or alkyl group which is non-native to a naturally-occurring amino acid). The acylated or alkylated analog can be in accordance with acylated or alkylated peptides described in the section “Acylation and alkylation.” In some embodiments, the acyl group is a C4 to a C30 fatty acyl group, such as, for example, a C10 fatty acyl or alkyl group, a C12 fatty acyl or alkyl group, a C14 fatty acyl or alkyl group, a C16 fatty acyl or alkyl group, a C18 fatty acyl or alkyl group, a C20 acyl or alkyl group, or a C22 acyl or alkyl group. The acyl or alkyl group may be covalently attached to any amino acid of the analog, including, but not limited to the amino acid at position 10 or 40, or the C-terminal amino acid. In certain embodiments, the analog comprises a C-terminal extension (e.g., an amino acid sequence of SEQ ID NO: 1095) and an addition of an amino acid comprising the acyl or alkyl group, such that the acyl or alkyl group is covalently linked to the analog at position 40. In some embodiments, the acyl or alkyl group is covalently linked to the side chain of an amino acid of Formula I, II, or III, e.g., a Lys residue. The acyl or alkyl group may be covalently linked to an amino acid which is native to the glucagon sequence (SEQ ID NO: 1001) or may be linked to an amino acid which is added to the sequence of SEQ ID NO: 1001 or to the sequence of SEQ ID NO: 1001 followed by SEQ ID NO: 1095 (at the N- or C-terminus) or may be linked to an amino acid which replaces a native amino acid, e.g., the Tyr at position 10 of SEQ ID NO: 1001.

[0740] In the above exemplary embodiments, wherein the analog comprises an acyl or alkyl group, the analog may be attached to the acyl or alkyl group via a spacer, as described herein. The spacer, for example, may be 3 to 10 atoms in length and may be, for instance, an amino acid (e.g., 6-amino hexanoic acid, any amino acid described herein), a dipeptide (e.g., Ala-Ala, βAla-βAla, Leu-Leu, Pro-Pro, γGlu-γGlu), a tripeptide, or a hydrophilic or hydrophobic bifunctional spacer. In certain aspects, the total length of the spacer and the acyl or alkyl group is about 14 to about 28 atoms. In some embodiments, the amino acid spacer is not γ-Glu. In some embodiments, the dipeptide spacer is not γ-Glu-γ-Glu.

[0741] In still further exemplary embodiments, the analog of glucagon having GIP agonist activity comprises the amino acid sequence according to any one of SEQ ID NOs: 1227, 1228, 1229 or 1230 that further comprises the following modifications:
[0742] (a) optionally, an amino acid modification at position 1 that confers GIP agonist activity,
[0743] (b) an extension of about 1 to about 21 amino acids C-terminal to the amino acid at position 29, wherein at least one of the amino acids of the extension is acylated or alkylated, and
[0744] (d) up to 6 further amino acid modifications,
   wherein the EC50 of the analog for GIP receptor activation is about 10 nM or less.

[0745] In some aspects, the acylated or alkylated amino acid is an amino acid of Formula I, II, or III. In more specific embodiments, the amino acid of Formula I is Dab, Orn, Lys, or homoLys. Also, in some embodiments, the about 1 to about 21 amino acids comprises the amino acid sequence of GPSSGAPPPS (SEQ ID NO: 1095) or XGPSSGAPPPS (SEQ ID NO: 1096), wherein X is any amino acid, or GPSSGAPPPK (SEQ ID NO: 1170) or XGPSSGAPPPK (SEQ ID NO: 1171) or XGPSSGAPPPSK (SEQ ID NO: 1172), wherein X is Gly or a small, aliphatic or non-polar or slightly polar amino acid. In some embodiments, the about 1 to about 21 amino acids may comprise sequences containing one or more conservative substitutions relative to SEQ ID NO: 1095, 1096, 1170, 1171 or 1172. In some embodiments, the acylated or alkylated amino acid is located at position 37, 38, 39, 40, 41, 42, or 43 of the C-terminally-extended analog. In certain embodiments, the acylated or alkylated amino acid is located at position 40 of the C-terminally extended analog.

[0746] In any of the above exemplary embodiments, the amino acid at position 1 that confers GIP agonist activity can be an amino acid lacking an imidazole side chain. The amino acid at position 1 can, for example, be a large, aromatic amino acid. In some embodiments, the large, aromatic amino acid is any of those described herein, including, for example, Tyr.

[0747] The analog of the above exemplary embodiments can further comprise 1-6 further amino acid modifications, such as, for example, any of the modifications described herein which increase or decrease the activity at any of the GIP, GLP-1, and glucagon receptors, improve solubility, improve duration of action or half-life in circulation, delay the onset of action, or increase stability.

[0748] In certain aspects, glucagon analogs described in the above exemplary embodiment, comprise further amino acid modifications at one, two or all of positions 27, 28 and 29.

[0749] Modifications at these positions can be any of the modifications described herein relative to these positions. For example, relative to SEQ ID NO: 1227, 1228, 1229 or 1230, position 27 can be substituted with a large aliphatic amino acid (e.g., Leu, Ile or norleucine) or Met, position 28 can be substituted with another small aliphatic amino acid (e.g., Gly or Ala) or Asn, and/or position 29 can be substituted with another small aliphatic amino acid (e.g., Ala or Gly) or Thr. Alternatively, the analog can comprise such amino acid modifications at position 27 and/or 28.

[0750] The analog can further comprise one or more of the following additional modifications:
[0751] (i) the amino acid at position 2 is any one of D-Ser, Ala, D-Ala, Gly, N-methyl-Ser, AIB, Val, or α-amino-N-butyric acid;
[0752] (ii) the amino acid at position 10 is Tyr, Trp, Lys, Orn, Glu, Phe, or Val;
[0753] (iii) linkage of an acyl group to a Lys at position 10;
[0754] (iv) the amino acid at position 12 is Ile, Lys or Arg;
[0755] (v) the amino acid at position 16 is any one of Ser, Glu, Gln, homoglutamic acid, homocysteic acid, Thr, Gly, or AIB;
[0756] (vi) the amino acid at position 17 is Gln or Arg;
[0757] (vii) the amino acid at position 18 is any one of Ala, Arg, Ser, Thr, or Gly;
[0758] (viii) the amino acid at position 20 is any one of Ala, Ser, Thr, Lys, Citrulline, Arg, Orn, or AIB or another alpha, alpha-disubstituted amino acid;
[0759] (ix) the amino acid at position 21 is any one of Glu, Asp, homoglutamic acid, homocysteic acid;
[0760] (x) the amino acid at position 23 is Val or Ile;
[0761] (xi) the amino acid at position 24 is any one of Gln, Asn, Ala, Ser, Thr, or AIB; and
[0762] (xii) one or more conservative substitutions at any of positions 2, 5, 9, 10, 11, 12, 13, 14, 15, 16, 17, 18, 19, 20, 21, 24, 27, 28, and 29.
   The analog in some embodiments comprise a combination of the modifications (i) through (xii). Alternatively or additionally, the analog can comprise an amino acid modification at position 3 (e.g., an amino acid substitution of Gln with Glu), wherein the analog has less than 1% of the activity of glucagon at the glucagon receptor. Alternatively or additionally, the analog can comprise an amino acid modification at position 7 (e.g., an amino acid substitution of Thr with an amino acid lacking a hydroxyl group, e.g., Abu or Ile), wherein the analog has less than about 10% of the activity of GLP-1 at the GLP-1 receptor.

[0763] With regard to the exemplary embodiments, the analog can be covalently linked to a hydrophilic moiety. In some embodiments, the analog is covalently linked to the hydrophilic moiety at any of amino acid positions 16, 17, 20, 21, 24, 29, 40, or the C-terminus. In certain embodiments, the analog comprises a hydrophilic moiety covalently linked to the analog at position 24.

[0764] In some embodiments, the hydrophilic moiety is covalently linked to a Lys, Cys, Orn, homocysteine, or acetyl-phenylalanine of the analog. The Lys, Cys, Orn, homocysteine, or acetyl-phenylalanine may be an amino acid that is native to SEQ ID NO: 1001, 1227, 1228, 1229 or 1230 or it may be a substituted amino acid. In some embodiments, wherein the hydrophilic moiety is linked to a Cys, the linkage may comprise the structure

[chemical structure]

[0765] With regard to the analogs comprising a hydrophilic moiety, the hydrophilic moiety may be any of those described herein. See, e.g., the teachings under the section “Linkage of hydrophilic moieties.” In some embodiments, the hydrophilic moiety is a polyethylene glycol (PEG). The PEG in certain embodiments has a molecular weight of about 1,000 Daltons to about 40,000 Daltons, e.g., about 20,000 Daltons to about 40,000 Daltons.

[0766] With regard to the exemplary embodiments, the analog can comprise a modified amino acid within the C-terminal extension in which the side chain is covalently linked to an acyl or alkyl group. The acylated or alkylated analog can be in accordance with acylated or alkylated peptides described in the section “Acylation and alkylation.” In some embodiments, the acyl group is a C4 to a C30 fatty acyl group, such as, for example, a C10 fatty acyl or alkyl group, a C12 fatty acyl or alkyl group, a C14 fatty acyl or alkyl group, a C16 fatty acyl or alkyl group, a C18 fatty acyl or alkyl group, a C20 acyl or alkyl group, or a C22 acyl or alkyl group. The acyl or alkyl group may be covalently attached to any amino acid of the analog, including, but not limited to the amino acid at position 10 or 40, or the C-terminal amino acid. In some embodiments, the acyl or alkyl group is covalently linked to the side chain of an amino acid of Formula I, II, or III, e.g., a Lys residue. The acyl or alkyl group is covalently linked to an amino acid which is native to SEQ ID NO: 1001, 1227, 1228, 1229 or 1230 or it may be linked to a substituted amino acid. The acyl or alkyl group is covalently linked to an amino acid which is native to SEQ ID NO: 1095, 1096, 1171 or 1172, or it may be linked to a substituted amino acid.

[0767] In the above exemplary embodiments, wherein the analog comprises an acyl or alkyl group, the analog may be attached to the acyl or alkyl group via a spacer, as described herein. The spacer, for example, may be 3 to 10 atoms in length and may be, for instance, an amino acid (e.g., 6-amino hexanoic acid, any amino acid described herein), a dipeptide (e.g., Ala-Ala, βAla-βAla, Leu-Leu, Pro-Pro, γGlu-γGlu), a tripeptide, or a hydrophilic or hydrophobic bifunctional spacer. In certain aspects, the total length of the spacer and the acyl or alkyl group is about 14 to about 28 atoms. In some embodiments, the amino acid spacer is not γ-Glu. In some embodiments, the dipeptide spacer is not γ-Glu-γ-Glu.

[0768] In some very specific embodiments, an analog of the invention comprises an amino acid sequence selected from the group consisting of SEQ ID NOs: 1099-1141, 1144-1164, 1166, 1192-1207, 1209-1221 and 1223 or selected from the group consisting of SEQ ID NOs: 1167-1169, 1173-1178 and 1225.

[0769] Further, specific examples of analogs of the invention include but are not limited to, any of those referenced in Tables 1-3.

[0770] In still further exemplary embodiments, the analog of glucagon having GIP agonist activity comprises an acyl or alkyl group (e.g., an acyl or alkyl group which is non-native to a naturally occurring amino acid), wherein the acyl or alkyl group is attached to a spacer, wherein (i) the spacer is attached to the side chain of the amino acid at position 10 of the analog; or (ii) the analog comprises an extension of 1 to 21 amino acids C-terminal to the amino acid at position 29 and the spacer is attached to the side chain of an amino acid corresponding to one of positions 37-43 relative to SEQ ID NO: 1001, wherein the EC50 of the analog for GIP receptor activation is about 10 nM or less.

[0771] In such embodiments, the analog may comprise an amino acid sequence of SEQ ID NO: 1001 with (i) an amino acid modification at position 1 that confers GIP agonist activity, (ii) amino acid modifications at one, two, or all of positions 27, 28, and 29, (iii) at least one of:
[0772] (A) the analog comprises a lactam bridge between the side chains of amino acids at positions i and i+4 or between the side chains of amino acids at positions j and j+3, wherein i is 12, 13, 16, 17, 20 or 24, and wherein j is 17;
[0773] (B) one, two, three, or all of the amino acids at positions 16, 20, 21, and 24 of the analog is substituted with an α,α-disubstituted amino acid; or
[0774] (C) the analog comprises (i) an amino acid substitution of Ser at position 16 with an amino acid of Formula IV:

[chemical structure]

wherein n is 1 to 7, wherein each of R1 and R2 is independently selected from the group consisting of H, C₁-C₁₈ alkyl, (C₁-C₁₈ alkyl)OH, (C₁-C₁₈ alkyl)NH₂, (C₁-C₁₈ alkyl)SH, (C₀-C₄ alkyl)(C₃-C₆)cycloalkyl, (C₀-C₄ alkyl)(C₂-C₅ heterocyclic), (C₀-C₄ alkyl)(C₆-C₁₀ aryl)R₇, and (C₁-C₄ alkyl)(C₃-C₉ heteroaryl), wherein R₇ is H or OH, and the side chain of the amino acid of Formula IV comprises a free amino group; and (ii) an amino acid substitution of the Gln at position 20 with an alpha, alpha-disubstituted amino acid.

[0775] and (iv) up to 6 further amino acid modifications.

[0776] The alpha, alpha-disubstituted amino acid of the analog of these embodiments may be any alpha, alpha-disubstituted amino acid, including, but not limited to, amino iso-butyric acid (AIB), an amino acid disubstituted with the same or a different group selected from methyl, ethyl, propyl, and n-butyl, or with a cyclooctane or cycloheptane (e.g., 1-aminocyclooctane-1-carboxylic acid). In certain embodiments, the alpha, alpha-disubstituted amino acid is AIB.

[0777] The amino acid of Formula IV of the analog of these embodiments may be any amino acid, such as, for example, the amino acid of Formula IV, wherein n is 1, 2, 3, 4, 5, 6, 7, 8, 9, 10, 11, 12, 13, 14, 15, or 16. In certain embodiments, n is 2, 3, 4, or 5, in which case, the amino acid is Dab, Orn, Lys, or homoLys respectively.

[0778] In any of the above exemplary embodiments, the amino acid modification at position 1 that confers GIP agonist activity can be a substitution of His with an amino acid lacking an imidazole side chain. The amino acid modification at position 1 can, for example, be a substitution of His with a large, aromatic amino acid. In some embodiments, the large, aromatic amino acid is any of those described herein, including, for example, Tyr.

[0779] Also, with regard to the above exemplary embodiments, amino acid modifications at one, two, or all of positions 27, 28, and 29 can be any of the modifications at these positions described herein. For example, the Met at position 27 can be substituted with a large aliphatic amino acid, optionally Leu, the Asn at position 28 can be substituted with a small aliphatic amino acid, optionally Ala, and/or the Thr at position 29 can be substituted with a small aliphatic amino acid, optionally Gly. Alternatively, the analog can comprise such amino acid modifications at position 27 and/or 28.

[0780] The analog of the above exemplary embodiments can further comprise 1-9 or 1-6 further, additional amino acid modifications, e.g. 1, 2, 3, 4, 5, 6, 7, 8 or 9 further amino acid modifications, such as, for example, any of the modifications described herein which increase or decrease the activity at any of the GIP, GLP-1, and glucagon receptors, improve solubility, improve duration of action or half-life in circulation, delay the onset of action, or increase stability. The analog can further comprise, for example, an amino acid modification at position 12, optionally, a substitution with Be, and/or amino acid modifications at positions 17 and 18, optionally substitution with Q at position 17 and A at position 18, and/or an addition of GPSSGAPPPS (SEQ ID NO: 1095) or XGPSSGAPPPS (SEQ ID NO: 1096), or sequences containing one or more conservative substitutions relative to SEQ ID NO: 1095 or 1096, to the C-terminus. The analog can comprise one or more of the following modifications:
[0781] (i) Ser at position 2 substituted with D-Ser, Ala, D-Ala, Gly, N-methyl-Ser, AIB, Val, or α-amino-N-butyric acid;
[0782] (ii) Tyr at position 10 substituted with Trp, Lys, Orn, Glu, Phe, or Val;
[0783] (iii) Linkage of an acyl group to a Lys at position 10;
[0784] (iv) Lys at position 12 substituted with Arg;
[0785] (v) Ser at position 16 substituted with Glu, Gln, homoglutamic acid, homocysteic acid, Thr, Gly, Lys, or AIB;
[0786] (vi) Arg at position 17 substituted with Gln;
[0787] (vii) Arg at position 18 substituted with Ala, Ser, Thr, or Gly;
[0788] (viii) Gln at position 20 substituted with Ala, Ser, Thr, Lys, Citrulline, Arg, Orn, or AIB;
[0789] (ix) Asp at position 21 substituted with Glu, homoglutamic acid, homocysteic acid;
[0790] (x) Val at position 23 substituted with Ile;
[0791] (xi) Gln at position 24 substituted with Asn, Ala, Ser, Thr, or AIB; and
[0792] (xii) a conservative substitution at any of positions 2, 5, 9, 10, 11, 12, 13, 14, 15, 16, 17, 18, 19, 20, 21, 24, 27, 28, and 29.
   The analog in some embodiments comprise a combination of the modifications (i) through (xii). Alternatively or additionally, the analog can comprise an amino acid modification at position 3 (e.g., an amino acid substitution of Gln with Glu), wherein the analog has less than 1% of the activity of glucagon at the glucagon receptor. Alternatively or additionally, the analog can comprise an amino acid modification at position 7 (e.g., an amino acid substitution of Thr with an amino acid lacking a hydroxyl group, e.g., Abu or Ile), a deletion of the amino acid(s) C-terminal to the amino acid at position 27 or 28, yielding a 27- or 28-amino acid peptide, or a combination thereof, wherein the analog has less than about 10% of the activity of GLP-1 at the GLP-1 receptor.

[0793] With regard to the exemplary embodiments, the analog can be covalently linked to a hydrophilic moiety. In some embodiments, the analog is covalently linked to the hydrophilic moiety at any of amino acid positions 16, 17, 20, 21, 24, 29, 40, or the C-terminus. In certain embodiments, the analog comprises a C-terminal extension (e.g., an amino acid sequence of SEQ ID NO: 1095) and an addition of an amino acid comprising the hydrophilic moiety, such that the hydrophilic moiety is covalently linked to the analog at position 40.

[0794] In some embodiments, the hydrophilic moiety is covalently linked to a Lys, Cys, Orn, homocysteine, or acetyl-phenylalanine of the analog. The Lys, Cys, Orn, homocysteine, or acetyl-phenylalanine may be an amino acid that is native to the glucagon sequence (SEQ ID NO: 1001) or it may be an amino acid which is replacing a native amino acid of SEQ ID NO: 1001. In some embodiments, wherein the hydrophilic moiety is attached to a Cys, the linkage to the hydrophilic moiety can comprise the structure

[chemical structure]

[0795] With regard to the analogs comprising a hydrophilic moiety, the hydrophilic moiety may be any of those described herein. See, e.g., the teachings under the section “Linkage of hydrophilic moieties.” In some embodiments, the hydrophilic moiety is a polyethylene glycol (PEG). The PEG in certain embodiments has a molecular weight of about 1,000 Daltons to about 40,000 Daltons, e.g., about 20,000 Daltons to about 40,000 Daltons.

[0796] In the exemplary embodiments, wherein the analog comprises an acyl or alkyl group, which is attached to the analog via a spacer, the spacer can be any spacer as described herein. The spacer, for example, may be 3 to 10 atoms in length and may be, for instance, an amino acid (e.g., 6-amino hexanoic acid, any amino acid described herein), a dipeptide (e.g., Ala-Ala, βAla-βAla, Leu-Leu, Pro-Pro, γGlu-γGlu), a tripeptide, or a hydrophilic or hydrophobic bifunctional spacer. In certain aspects, the total length of the spacer and the acyl or alkyl group is about 14 to about 28 atoms. In some embodiments, the amino acid spacer is not γ-Glu. In some embodiments, the dipeptide spacer is not γ-Glu-γ-Glu.

[0797] The acyl or alkyl group is any acyl or alkyl group as described herein, such as an acyl or alkyl group which is non-native to a naturally occurring amino acid. The acyl or alkyl group in some embodiments is a C4 to C30 fatty acyl group, such as, for example, a C10 fatty acyl or alkyl group, a C12 fatty acyl or alkyl group, a C14 fatty acyl or alkyl group, a C16 fatty acyl or alkyl group, a C18 fatty acyl or alkyl group, a C20 acyl or alkyl group, or a C22 acyl or alkyl group, or a C4 to C30 alkyl group. In specific embodiments, the acyl group is a C12 to C18 fatty acyl group (e.g., a C14 or C16 fatty acyl group).

[0798] In some embodiments, the extension of about 1 to about 21 amino acids C-terminal to the amino acid at position 29 of the analog comprises the amino acid sequence of GPSSGAPPPS (SEQ ID NO: 1095) or XGPSSGAPPPS (SEQ ID NO: 1096), wherein X is any amino acid, or GPSSGAPPPK (SEQ ID NO: 1170) or XGPSSGAPPPK (SEQ ID NO: 1171) or XGPSSGAPPPSK (SEQ ID NO: 1172), wherein X is Gly or a small, aliphatic or non-polar or slightly polar amino acid. In some embodiments, the about 1 to about 21 amino acids may comprise sequences containing one or more conservative substitutions relative to SEQ ID NO: 1095, 1096, 1170, 1171 or 1172. In some embodiments, the acylated or alkylated amino acid is located at position 37, 38, 39, 40, 41, 42, or 43 of the C-terminally-extended analog. In certain embodiments, the acylated or alkylated amino acid is located at position 40 of the C-terminally extended analog.

[0799] The GIP agonist may be a peptide comprising the amino acid sequence of any of the amino acid sequences, e.g., SEQ ID NOs: 1005-1094, optionally with up to 1, 2, 3, 4, or 5 further modifications that retain GIP agonist activity. In certain embodiments, the GIP agonist comprises the amino acids of any of SEQ ID NOs: 1099-1262.

### Class 3 Glucagon Related Peptides

[0800] In certain embodiments, the glucagon related peptide is a Class 3 glucagon related peptide, which is described herein and in International Patent Application No. PCT/US2009/47438 (filed on Jun. 16, 2009), International Patent Application Publication No. WO 2008/101017, published on Aug. 21, 2008, and U.S. Provisional Application No. 61/090,412 and U.S. Application No. 61/177,476, the contents of which are incorporated by reference in their entirety.

[0801] Some of the biological sequences referenced in the following section (SEQ ID NOs: 1-656) relating to Class 3 glucagon related peptides are correspond to SEQ ID NOs: 1-656 in International Patent Application No. PCT/US2009/47438.

[0802] Activity

[0803] The Class 3 glucagon related peptide can be a peptide that exhibits increased activity at the glucagon receptor, and in further embodiments exhibits enhanced biophysical stability and/or aqueous solubility. In addition, in some embodiments, the Class 3 glucagon related peptide has lost native glucagon's selectivity for the glucagon receptor verses the GLP-1 receptor, and thus represents co-agonists of those two receptors. Selected amino acid modifications within the Class 3 glucagon related peptide can control the relative activity of the peptide at the GLP-1 receptor verses the glucagon receptor. Thus, the Class 3 glucagon related peptide can be a glucagon/GLP-1 co-agonist that has higher activity at the glucagon receptor versus the GLP-1 receptor, a glucagon/GLP-1 co-agonist that has approximately equivalent activity at both receptors, or a glucagon/GLP-1 co-agonist that has higher activity at the GLP-1 receptor versus the glucagon receptor. The latter category of co-agonist can be engineered to exhibit little or no activity at the glucagon receptor, and yet retain ability to activate the GLP-1 receptor with the same or better potency than native GLP-1. Any of these co-agonists may also include modifications that confer enhanced biophysical stability and/or aqueous solubility.

[0804] Modifications of the Class 3 glucagon related peptide can be made to produce a glucagon peptide having anywhere from at least about 1% (including at least about 1.5%, 2%, 5%, 7%, 10%, 20%, 30%, 40%, 50%, 60%, 75%, 100%, 125%, 150%, 175%) to about 200% or higher activity at the GLP-1 receptor relative to native GLP-1 and anywhere from at least about 1% (including about 1.5%, 2%, 5%, 7%, 10%, 20%, 30%, 40%, 50%, 60%, 75%, 100%, 125%, 150%, 175%, 200%, 250%, 300%, 350%, 400%, 450%) to about 500% or higher activity at the glucagon receptor relative to native glucagon. The amino acid sequence of native glucagon is SEQ ID NO: 1, the amino acid sequence of GLP-1(7-36)amide is SEQ ID NO: 52, and the amino acid sequence of GLP-1(7-37)acid is SEQ ID NO: 50. In exemplary embodiments, a Class 3 glucagon related peptide may exhibit at least 10% of the activity of native glucagon at the glucagon receptor and at least 50% of the activity of native GLP-1 at the GLP-1 receptor, or at least 40% of the activity of native glucagon at the glucagon receptor and at least 40% of the activity of native GLP-1 at the GLP-1 receptor, or at least 60% of the activity of native glucagon at the glucagon receptor and at least 60% of the activity of native GLP-1 at the GLP-1 receptor.

[0805] Selectivity of a Class 3 glucagon related peptide for the glucagon receptor versus the GLP-1 receptor can be described as the relative ratio of glucagon/GLP-1 activity (the peptide's activity at the glucagon receptor relative to native glucagon, divided by the peptide's activity at the GLP-1 receptor relative to native GLP-1). For example, a Class 3 glucagon related peptide that exhibits 60% of the activity of native glucagon at the glucagon receptor and 60% of the activity of native GLP-1 at the GLP-1 receptor has a 1:1 ratio of glucagon/GLP-1 activity. Exemplary ratios of glucagon/GLP-1 activity include about 1:1, 1.5:1, 2:1, 3:1, 4:1, 5:1, 6:1, 7:1, 8:1, 9:1 or 10:1, or about 1:10, 1:9, 1:8, 1:7, 1:6, 1:5, 1:4, 1:3, 1:2, or 1:1.5. As an example, a glucagon/GLP-1 activity ratio of 10:1 indicates a 10-fold selectivity for the glucagon receptor versus the GLP-1 receptor. Similarly, a GLP-1/glucagon activity ratio of 10:1 indicates a 10-fold selectivity for the GLP-1 receptor versus the glucagon receptor.

[0806] In some embodiments, the Class 3 glucagon related peptides have about 10% or less of the activity of native glucagon at the glucagon receptor, e.g. about 1-10%, or about 0.1-10%, or greater than about 0.1% but less than about 10%, while exhibiting at least 20% of the activity of GLP-1 at the GLP-1 receptor. For example, exemplary Class 3 glucagon related peptides described herein have about 0.5%, about 1% or about 7% of the activity of native glucagon, while exhibiting at least 20% of the activity of GLP-1 at the GLP-1 receptor.

[0807] The Class 3 glucagon related peptide can be a glucagon peptide with increased or decreased activity at the glucagon receptor, or GLP-1 receptor, or both. The Class 3 glucagon related peptide can be a glucagon peptide with altered selectivity for the glucagon receptor versus the GLP-1 receptor.

[0808] Thus, as disclosed herein high potency Class 3 glucagon related peptides are provided that also exhibit improved solubility and/or stability. An exemplary high potency Class 3 glucagon related peptide exhibits at least about 200% of the activity of native glucagon at the glucagon receptor, and optionally is soluble at a concentration of at least 1 mg/mL at a pH between 6 and 8, or between 6 and 9, or between 7 and 9 (e.g. pH 7), and optionally retains at least 95% of the original peptide (e.g. 5% or less of the original peptide is degraded or cleaved) after 24 hours at 25° C. As another example, an exemplary Class 3 glucagon related peptide exhibits greater than about 40% or greater than about 60% activity at both the glucagon and the GLP-1 receptors (at a ratio between about 1:3 and 3:1, or between about 1:2 and 2:1), is optionally soluble at a concentration of at least 1 mg/mL at a pH between 6 and 8 or between 6 and 9, or between 7 and 9 (e.g. pH 7), and optionally retains at least 95% of the original peptide after 24 hours at 25° C. Another exemplary Class 3 glucagon related peptide exhibits about 175% or more of the activity of native glucagon at the glucagon receptor and about 20% or less of the activity of native GLP-1 at the GLP-1 receptor, is optionally soluble at a concentration of at least 1 mg/mL at a pH between 6 and 8 or between 6 and 9, or between 7 and 9 (e.g. pH 7), and optionally retains at least 95% of the original peptide after 24 hours at 25° C. Yet another exemplary Class 3 glucagon related peptide exhibits about 10% or less of the activity of native glucagon at the glucagon receptor and at least about 20% of the activity of native GLP-1 at the GLP-1 receptor, is optionally soluble at a concentration of at least 1 mg/mL at a pH between 6 and 8 or between 6 and 9, or between 7 and 9 (e.g. pH 7), and optionally retains at least 95% of the original peptide after 24 hours at 25° C. Yet another exemplary Class 3 glucagon related peptide exhibits about 10% or less but above 0.1%, 0.5% or 1% of the activity of native glucagon at the glucagon receptor and at least about 50%, 60%, 70%, 80%, 90% or 100% or more of the activity of native GLP-1 at the GLP-1 receptor, is optionally soluble at a concentration of at least 1 mg/mL at a pH between 6 and 8 or between 6 and 9, or between 7 and 9 (e.g. pH 7), and optionally retains at least 95% of the original peptide after 24 hours at 25° C. In some embodiments, such Class 3 glucagon related peptides retain at least 22, 23, 24, 25, 26, 27 or 28 of the naturally occurring amino acids at the corresponding positions in native glucagon (e.g. have 1-7, 1-5 or 1-3 modifications relative to naturally occurring glucagon).

[0809] Modifications Affecting Glucagon Activity

[0810] Increased activity at the glucagon receptor is provided by an amino acid modification at position 16 of native glucagon (SEQ ID NO: 1). In some embodiments, the Class 3 glucagon related peptide is a glucagon agonist that has been modified relative to the wild type peptide of His-Ser-Gln-Gly-Thr-Phe-Thr-Ser-Asp-Tyr-Ser-Lys-Tyr-Leu-Asp-Ser-Arg-Arg-Ala-Gln-Asp-Phe-Val-Gln-Trp-Leu-Met-Asn-Thr (SEQ ID NO: 1) to enhance the peptide's potency at the glucagon receptor. The normally occurring serine at position 16 of native glucagon (SEQ ID NO: 1) can be substituted with select acidic amino acids to enhance the potency of glucagon, in terms of its ability to stimulate cAMP synthesis in a validated in vitro model assay (see Example 5). More particularly, this substitution enhances the potency of the analog at least 2-fold, 4-fold, 5-fold, and up to 10-fold greater at the glucagon receptor. This substitution also enhances the analog's activity at the GLP-1 receptor at least 5-fold, 10-fold, or 15-fold relative to native glucagon, but selectivity is maintained for the glucagon receptor over the GLP-1 receptor.

[0811] By way of nonlimiting example, such enhanced potency can be provided by substituting the naturally occurring serine at position 16 with glutamic acid or with another negatively charged amino acid having a side chain with a length of 4 atoms, or alternatively with any one of glutamine, homoglutamic acid, or homocysteic acid, or a charged amino acid having a side chain containing at least one heteroatom, (e.g. N, O, S, P) and with a side chain length of about 4 (or 3-5) atoms. In accordance with some embodiments, the serine residue at position 16 of native glucagon is substituted with an amino acid selected from the group consisting of glutamic acid, glutamine, homoglutamic acid, homocysteic acid, threonine, or glycine. In accordance with some embodiments, the serine residue at position 16 of native glucagon is substituted with an amino acid selected from the group consisting of glutamic acid, glutamine, homoglutamic acid and homocysteic acid, and in some embodiments the serine residue is substituted with glutamic acid.

[0812] In some embodiments, the enhanced potency Class 3 glucagon related peptide comprises a peptide of SEQ ID NO: 2, SEQ ID NO: 3, SEQ ID NO: 4, SEQ ID NO: 5, SEQ ID NO: 6, SEQ ID NO: 7 or a glucagon agonist analog of SEQ ID NO: 5. In accordance with some embodiments, a Class 3 glucagon related peptide having enhanced potency at the glucagon receptor relative to wild type glucagon is provided wherein the peptide comprises the sequence of SEQ ID NO: 7, SEQ ID NO: 8, SEQ ID NO: 9 or SEQ ID NO: 10, wherein the glucagon peptide retains its selectivity for the glucagon receptor relative to the GLP-1 receptors. In some embodiments, the Class 3 glucagon related peptide having enhanced specificity for the glucagon receptor comprises the peptide of SEQ ID NO: 8, SEQ ID NO: 9, SEQ ID NO: 10 or a glucagon agonist analog thereof, wherein the carboxy terminal amino acid retains its native carboxylic acid group. In accordance with some embodiments, a Class 3 glucagon related peptide comprises the sequence of NH₂-His-Ser-Gln-Gly-Thr-Phe-Thr-Ser-Asp-Tyr-Ser-Lys-Tyr-Leu-Asp-Glu-Arg-Arg-Ala-Gln-Asp-Phe-Val-Gln-Trp-Leu-Met-Asn-Thr-COOH (SEQ ID NO: 10), wherein the peptide exhibits approximately fivefold enhanced potency at the glucagon receptor, relative to native glucagon as measured by the in vitro cAMP assay of Example 5.

[0813] Glucagon receptor activity can be reduced, maintained, or enhanced by an amino acid modification at position 3, e.g. substitution of the naturally occurring glutamine at position 3. In some embodiments, substitution of the amino acid at position 3 with an acidic, basic, or hydrophobic amino acid (glutamic acid, ornithine, norleucine) has been shown to substantially reduce or destroy glucagon receptor activity. The analogs that are substituted with, for example, glutamic acid, ornithine, or norleucine have about 10% or less of the activity of native glucagon at the glucagon receptor, e.g. about 1-10%, or about 0.1-10%, or greater than about 0.1% but less than about 10%, while exhibiting at least 20% of the activity of GLP-1 at the GLP-1 receptor. For example, exemplary analogs described herein have about 0.5%, about 1% or about 7% of the activity of native glucagon, while exhibiting at least 20% of the activity of GLP-1 at the GLP-1 receptor. In particular, any of the Class 3 glucagon related peptides, including glucagon analogs, glucagon agonist analogs, glucagon co-agonists, and glucagon/GLP-1 co-agonist molecules, described herein may be modified to contain a modification at position 3, e.g., Gln substituted with Glu, to produce a peptide with high selectivity, e.g., tenfold selectivity, for the GLP-1 receptor as compared to the selectivity for the glucagon receptor.

[0814] In another embodiment, the naturally occurring glutamine at position 3 of any of the Class 3 glucagon peptides can be substituted with a glutamine analog without a substantial loss of activity at the glucagon receptor, and in some cases, with an enhancement of glucagon receptor activity, as described herein. In specific embodiments, the amino acid at position 3 is substituted with Dab(Ac). For example, glucagon agonists can comprise the amino acid sequence of SEQ ID NO: 595, SEQ ID NO: 601 SEQ ID NO: 603, SEQ ID NO: 604, SEQ ID NO: 605, and SEQ ID NO: 606.

[0815] It was observed that modifications at position 2 (e.g. AIB at position 2) and in some cases modifications at position 1 may reduce glucagon activity. This reduction in glucagon activity can be restored by stabilizing the alpha-helix in the C-terminal portion of glucagon, e.g. through means described herein, for example, through a covalent bond between the side chains of the amino acids at positions “i” and “i+4”, e.g., 12 and 16, 16 and 20, or 20 and 24. In some embodiments, this covalent bond is a lactam bridge between a glutamic acid at position 16 and a lysine at position 20. In some embodiments, this covalent bond is an intramolecular bridge other than a lactam bridge. For example, suitable covalent bonding methods include any one or more of olefin metathesis, lanthionine-based cyclization, disulfide bridge or modified sulfur-containing bridge formation, the use of α, ω-diaminoalkane tethers, the formation of metal-atom bridges, and other means of peptide cyclization.

[0816] Modifications Affecting GLP-1 Activity

[0817] Enhanced activity at the GLP-1 receptor is provided by replacing the carboxylic acid of the C-terminal amino acid with a charge-neutral group, such as an amide or ester. In some embodiments, these Class 3 glucagon related peptides comprise a sequence of SEQ ID NO: 20, wherein the carboxy terminal amino acid has an amide group in place of the carboxylic acid group found on the native amino acid. These Class 3 glucagon related peptides have strong activity at both the glucagon and GLP-1 receptors and thus act as co-agonists at both receptors. In accordance with some embodiments, the Class 3 glucagon related peptide is a glucagon and GLP-1 receptor co-agonist, wherein the peptide comprises the sequence of SEQ ID NO: 20, wherein the amino acid at position 28 is Asn or Lys and the amino acid at position 29 is Thr-amide.

[0818] Increased activity at the GLP-1 receptor is provided by modifications that stabilize the alpha helix in the C-terminal portion of glucagon (e.g. around residues 12-29).

[0819] In some embodiments, such modifications permit formation of an intramolecular bridge between the side chains of two amino acids that are separated by three intervening amino acids (i.e., an amino acid at position “i” and an amino acid at position “i+4”, wherein i is any integer between 12 and 25), by two intervening amino acids, i.e., an amino acid at position “j” and an amino acid at position “j+3,” wherein j is any integer between 12 and 27, or by six intervening amino acids, i.e., an amino acid at position “k” and an amino acid at position “k+7,” wherein k is any integer between 12 and 22. In exemplary embodiments, the bridge or linker is about 8 (or about 7-9) atoms in length and forms between side chains of amino acids at positions 12 and 16, or at positions 16 and 20, or at positions 20 and 24, or at positions 24 and 28. The two amino acid side chains can be linked to one another through non-covalent bonds, e.g., hydrogen-bonding, ionic interactions, such as the formation of salt bridges, or by covalent bonds.

[0820] In accordance with some embodiments, the Class 3 glucagon related peptide exhibits glucagon/GLP-1 receptor co-agonist activity and comprises an amino acid sequence selected from the group consisting of SEQ ID NO: 11, 47, 48 and 49. In some embodiments, the side chains are covalently bound to one another, and in some embodiments the two amino acids are bound to one another to form a lactam ring.

[0821] In accordance with some embodiments, the Class 3 glucagon related peptide comprises SEQ ID NO: 45, wherein at least one lactam ring is formed between the side chains of an amino acid pair selected from the group consisting of amino acid pairs 12 and 16, 16 and 20, 20 and 24 or 24 and 28. In some embodiments, the Class 3 glucagon related peptide comprises a glucagon peptide analog of SEQ ID NO: 20, wherein the peptide comprises an intramolecular lactam bridge formed between amino acid positions 12 and 16 or between amino acid positions 16 and 20. In some embodiments, the Class 3 glucagon related peptide comprises the sequence of SEQ ID NO: 20, wherein an intramolecular lactam bridge is formed between amino acid positions 12 and 16, between amino acid positions 16 and 20, or between amino acid positions 20 and 24 and the amino acid at position 29 is glycine, wherein the sequence of SEQ ID NO: 29 is linked to the C-terminal amino acid of SEQ ID NO: 20. In a further embodiment, the amino acid at position 28 is aspartic acid.

[0822] In some specific embodiments, stabilization of the alpha helix structure in the C-terminal portion of the Class 3 glucagon related peptide is achieved through the formation of an intramolecular bridge other than a lactam bridge. For example, suitable covalent bonding methods include any one or more of olefin metathesis, lanthionine-based cyclization, disulfide bridge or modified sulfur-containing bridge formation, the use of α, ω-diaminoalkane tethers, the formation of metal-atom bridges, and other means of peptide cyclization are used to stabilize the alpha helix.

[0823] Furthermore, enhanced activity at the GLP-1 receptor may be achieved by stabilizing the alpha-helix structure in the C-terminal portion of the glucagon peptide (around amino acids 12-29) through purposeful introduction of one or more α,α-disubstituted amino acids at positions that retain the desired activity. Such peptides may be considered herein as a peptide lacking an intramolecular bridge. In some aspects, stabilization of the alpha-helix is accomplished in this manner without introduction of an intramolecular bridge such as a salt bridge or covalent bond. In some embodiments, one, two, three, four or more of positions 16, 17, 18, 19, 20, 21, 24 or 29 of a glucagon peptide is substituted with an α,α-disubstituted amino acid. For example, substitution of position 16 of the Class 3 glucagon related peptide with amino iso-butyric acid (AIB) enhances GLP-1 activity, in the absence of a salt bridge or lactam. In some embodiments, one, two, three or more of positions 16, 20, 21 or 24 are substituted with AIB.

[0824] Enhanced activity at the GLP-1 receptor may be achieved by an amino acid modification at position 20. In some embodiments, the glutamine at position 20 is replaced with another hydrophilic amino acid having a side chain that is either charged or has an ability to hydrogen-bond, and is at least about 5 (or about 4-6) atoms in length, for example, lysine, citrulline, arginine, or ornithine.

[0825] Increased activity at the GLP-1 receptor is demonstrated in Class 3 glucagon related peptides comprising the C-terminal extension of SEQ ID NO: 26. GLP-1 activity in such Class 3 glucagon related peptides comprising SEQ ID NO: 26 can be further increased by modifying the amino acid at position 18, 28 or 29, or at position 18 and 29, as described herein.

[0826] A further modest increase in GLP-1 potency may be achieved by modifying the amino acid at position 10 to be Trp.

[0827] Combinations of the modifications that increase GLP-1 receptor activity may provide higher GLP-1 activity than any of such modifications taken alone. For example, the Class 3 glucagon related peptides can comprise modifications at position 16, at position 20, and at the C-terminal carboxylic acid group, optionally with a covalent bond between the amino acids at positions 16 and 20; can comprise modifications at position 16 and at the C-terminal carboxylic acid group; can comprise modifications at positions 16 and 20, optionally with a covalent bond between the amino acids at positions 16 and 20; or can comprise modifications at position 20 and at the C-terminal carboxylic acid group; optionally with the proviso that the amino acid at position 12 is not Arg; or optionally with the proviso that the amino acid at position 9 is not Glu.

[0828] Modifications Affecting Solubility

[0829] Addition of Hydrophilic Moieties

[0830] The Class 3 glucagon related peptides can be further modified to improve the peptide's solubility and stability in aqueous solutions at physiological pH, while retaining the high biological activity relative to native glucagon. Hydrophilic moieties as discussed herein can be attached to the Class 3 glucagon related peptide as further discussed herein.

[0831] In accordance with some embodiments, introduction of hydrophilic groups at positions 17, 21, and 24 of the Class 3 glucagon related peptide comprising SEQ ID NO: 9 or SEQ ID NO: 10 are anticipated to improve the solubility and stability of the high potency glucagon analog in solutions having a physiological pH. Introduction of such groups also increases duration of action, e.g. as measured by a prolonged half-life in circulation.

[0832] In some embodiments, the Class 3 glucagon related peptide comprises a sequence selected from the group consisting of SEQ ID NO: 11, SEQ ID NO: 12, SEQ ID NO: 13, SEQ ID NO: 14, SEQ ID NO: 15, SEQ ID NO: 16, SEQ ID NO: 17, SEQ ID NO: 18 and SEQ ID NO: 19, wherein the side chain of an amino acid residue at one of position 16, 17, 21 or 24 of said Class 3 glucagon related peptide further comprises a polyethylene glycol chain, having a molecular weight selected from the range of about 500 to about 40,000 Daltons. In some embodiments, the polyethylene glycol chain has a molecular weight selected from the range of about 500 to about 5,000 Daltons. In another embodiment. the polyethylene glycol chain has a molecular weight of about 10,000 to about 20,000 Daltons. In yet other exemplary embodiments the polyethylene glycol chain has a molecular weight of about 20,000 to about 40,000 Daltons.

[0833] Suitable hydrophilic moieties include any water soluble polymers known in the art, including the hydrophilic moieties described herein, homo- or co-polymers of PEG, and a monomethyl-substituted polymer of PEG (mPEG). In accordance with some embodiments the hydrophilic group comprises a polyethylene (PEG) chain. More particularly, in some embodiments, the Class 3 glucagon related peptide comprises the sequence of SEQ ID NO: 6 or SEQ ID NO: 7 wherein a PEG chain is covalently linked to the side chains of amino acids present at positions 21 and 24 of the Class 3 glucagon related peptide and the carboxy terminal amino acid of the Class 3 glucagon related peptide has the carboxylic acid group. In accordance with some embodiments, the polyethylene glycol chain has an average molecular weight selected from the range of about 500 to about 10,000 Daltons.

[0834] In accordance with some embodiments, the pegylated Class 3 glucagon related peptide comprises two or more polyethylene glycol chains covalently bound to the Class 3 glucagon related peptide wherein the total molecular weight of the glucagon chains is about 1,000 to about 5,000 Daltons. In some embodiments the pegylated glucagon agonist comprises a peptide consisting of SEQ ID NO: 5 or a glucagon agonist analog of SEQ ID NO: 5, wherein a PEG chain is covalently linked to the amino acid residue at position 21 and at position 24, and wherein the combined molecular weight of the two PEG chains is about 1,000 to about 5,000 Daltons.

[0835] Charged C-Terminus

[0836] The solubility of the Class 3 glucagon related peptide comprising SEQ ID NO: 20 can be further improved, for example, by introducing one, two, three or more charged amino acid(s) to the C-terminal portion of glucagon peptide of SEQ ID NO: 20, preferably at a position C-terminal to position 27. Such a charged amino acid can be introduced by substituting a native amino acid with a charged amino acid, e.g. at positions 28 or 29, or alternatively by adding a charged amino acid, e.g. after position 27, 28 or 29. In exemplary embodiments, one, two, three or all of the charged amino acids are negatively charged. Additional modifications, e.g. conservative substitutions, may be made to the Class 3 glucagon related peptide that still allow it to retain glucagon activity. In some embodiments, an analog of the Class 3 glucagon related peptide of SEQ ID NO: 20 is provided wherein the analog differs from SEQ ID NO: 20 by 1 to 2 amino acid substitutions at positions 17-26, and, in some embodiments, the analog differs from the peptide of SEQ ID NO: 20 by an amino acid substitution at position 20.

[0837] Acylation/Alkylation

[0838] In accordance with some embodiments, the glucagon peptide is modified to comprise an acyl or alkyl group, e.g., a C4 to C30 acyl or alkyl group. In some aspects, the acyl group or alkyl group is not naturally occurring on an amino acid. In specific aspects, the acyl or alkyl group is non-native to any naturally-occurring amino acid. Acylation or alkylation can increase the half-life in circulation and/or delay the onset of and/or extend the duration of action and/or improve resistance to proteases such as DPP-IV. The activity at the glucagon receptor and GLP-1 receptor of the Class 3 glucagon related peptides is maintained, if not substantially enhanced after acylation Further, the potency of the acylated analogs were comparable to the unacylated versions of the Class 3 glucagon related peptides, if not substantially enhanced.

[0839] In some embodiments, the invention provides a Class 3 glucagon related peptide modified to comprise an acyl group or alkyl group covalently linked to the amino acid at position 10 of the glucagon peptide. The glucagon peptide may further comprise a spacer between the amino acid at position 10 of the Class 3 glucagon related peptide and the acyl group or alkyl group. Any of the foregoing Class 3 glucagon related peptides may comprise two acyl groups or two alkyl groups, or a combination thereof.

[0840] In a specific aspect of the invention, the acylated Class 3 glucagon related peptide comprises the amino acid sequence of any of SEQ ID NOs: 534-544 and 546-549.

[0841] C-terminal Truncation

[0842] In some embodiments, the Class 3 glucagon related peptides described herein are further modified by truncation or deletion of one or two amino acids of the C-terminus of the glucagon peptide (i.e., position 29 and/or 28) without affecting activity and/or potency at the glucagon and GLP-1 receptors. In this regard, the Class 3 glucagon related peptide can comprise amino acids 1-27 or 1-28 of the native glucagon peptide (SEQ ID NO: 1), optionally with one or more modifications described herein.

[0843] In some embodiments, the truncated Class 3 glucagon related peptide comprises SEQ ID NO: 550 or SEQ ID NO: 551. In another embodiment, the truncated glucagon agonist peptide comprises SEQ ID NO: 552 or SEQ ID NO: 553.

[0844] C-terminal Extension

[0845] In accordance with some embodiments, the Class 3 glucagon related peptides disclosed herein are modified by the addition of a second peptide to the carboxy terminus of the glucagon peptide, for example, SEQ ID NO: 26, SEQ ID NO: 27 or SEQ ID NO: 28. In some embodiments, a Class 3 glucagon related peptide having a sequence selected from the group consisting of SEQ ID NO: 11, SEQ ID NO: 12, SEQ ID NO: 13, SEQ ID NO: 14, SEQ ID NO: 15, SEQ ID NO: 16, SEQ ID NO: 17, SEQ ID NO: 18, SEQ ID NO: 19, SEQ ID NO: 66, SEQ ID NO: 67, SEQ ID NO: 68, and SEQ ID NO: 69 is covalently bound through a peptide bond to a second peptide, wherein the second peptide comprises a sequence selected from the group consisting of SEQ ID NO: 26, SEQ ID NO: 27 and SEQ ID NO: 28. In a further embodiment, in Class 3 glucagon related peptides which comprise the C-terminal extension, the threonine at position 29 of the native glucagon peptide is replaced with a glycine. A Class 3 glucagon related peptide having a glycine substitution for threonine at position 29 and comprising the carboxy terminal extension of SEQ ID NO: 26 is four times as potent at the GLP-1 receptor as native glucagon modified to comprise the carboxy terminal extension of SEQ ID NO: 26. Potency at the GLP-1 receptor can be further enhanced by an alanine substitution for the native arginine at position 18.

[0846] Accordingly, the Class 3 glucagon related peptide can have a carboxy terminal extension of SEQ ID NO: 27 (KRNRNNIA) or SEQ ID NO: 28. In accordance with some embodiments, Class 3 glucagon related peptide comprising SEQ ID NO: 33 or SEQ ID NO: 20, further comprises the amino acid sequence of SEQ ID NO: 27 (KRNRNNIA) or SEQ ID NO: 28 linked to amino acid 29 of the glucagon peptide. More particularly, the Class 3 glucagon related peptide comprises a sequence selected from the group consisting of SEQ ID NO: 10, SEQ ID NO: 12, SEQ ID NO: 13 SEQ ID NO: 14 and SEQ ID NO: 15, further comprising the amino acid sequence of SEQ ID NO: 27 (KRNRNNIA) or SEQ ID NO: 28 linked to amino acid 29 of the glucagon peptide. More particularly, the glucagon peptide comprises a sequence selected from the group consisting of SEQ ID NO: 10, SEQ ID NO: 12, SEQ ID NO: 13 SEQ ID NO: 14, SEQ ID NO: 15, SEQ ID NO: 16, SEQ ID NO: 17, SEQ ID NO: 18, SEQ ID NO: 66, SEQ ID NO: 67, SEQ ID NO: 68, SEQ ID NO: 69, SEQ ID NO: 55 and SEQ ID NO: 56 further comprising the amino acid sequence of SEQ ID NO: 26 (GPSSGAPPPS) or SEQ ID NO: 29 linked to amino acid 29 of the Class 3 glucagon related peptide. In some embodiments, the Class 3 glucagon related peptide comprises the sequence of SEQ ID NO: 64.

[0847] Other Modifications

[0848] Any of the modifications described above with regard to Class 3 glucagon related peptides which increase or decrease glucagon receptor activity and which increase GLP-1 receptor activity can be applied individually or in combination. Combinations of the modifications that increase GLP-1 receptor activity generally provide higher GLP-1 activity than any of such modifications taken alone. Any of the modifications described above can also be combined with other modifications described herein in reference to Class 3 glucagon related peptides that confer other desirable properties, such as increased solubility and/or stability and/or duration of action. Alternatively, any of the modifications described above can be combined with other modifications described herein in reference to Class 3 glucagon related peptides that do not substantially affect solubility or stability or activity. Exemplary modifications include but are not limited to:
[0849] (A) Improving solubility, for example, by introducing one, two, three or more charged amino acid(s) to the C-terminal portion of native glucagon, preferably at a position C-terminal to position 27. Such a charged amino acid can be introduced by substituting a native amino acid with a charged amino acid, e.g. at positions 28 or 29, or alternatively by adding a charged amino acid, e.g. after position 27, 28 or 29. In exemplary embodiments, one, two, three or all of the charged amino acids are negatively charged. In other embodiments, one, two, three or all of the charged amino acids are positively charged. Such modifications increase solubility, e.g. provide at least 2-fold, 5-fold, 10-fold, 15-fold, 25-fold, 30-fold or greater solubility relative to native glucagon at a given pH between about 5.5 and 8, e.g., pH 7, when measured after 24 hours at 25° C.
[0850] (B) Increasing solubility and duration of action or half-life in circulation by addition of a hydrophilic moiety such as a polyethylene glycol chain, as described herein, e.g. at position 16, 17, 20, 21, 24 or 29, or at the C-terminal amino acid of the peptide.
[0851] (C) Increasing stability by modification of the aspartic acid at position 15, for example, by deletion or substitution with glutamic acid, homoglutamic acid, cysteic acid or homocysteic acid. Such modifications can reduce degradation or cleavage at a pH within the range of 5.5 to 8, especially in acidic or alkaline buffers, for example, retaining at least 75%, 80%, 90%, 95%, 96%, 97%, 98% or 99% of the original peptide after 24 hours at 25° C.
[0852] (D) Increasing stability by modification of the methionine at position 27, for example, by substitution with leucine or norleucine. Such modifications can reduce oxidative degradation. Stability can also be increased by modification of the Gln at position 20 or 24, e.g. by substitution with Ser, Thr, Ala or AIB. Such modifications can reduce degradation that occurs through deamidation of Gln. Stability can be increased by modification of Asp at position 21, e.g. by substitution with Glu. Such modifications can reduce degradation that occurs through dehydration of Asp to form a cyclic succinimide intermediate followed by isomerization to iso-aspartate.
[0853] (E) Increasing resistance to dipeptidyl peptidase IV (DPP IV) cleavage by modification of the amino acid at position 1 or 2 with the DPP-IV resistant amino acids described herein and including modification of the amino acid at position 2 with N-methyl-alanine.
[0854] (F) Conservative or non-conservative substitutions, additions or deletions that do not affect activity, for example, conservative substitutions at one or more of positions 2, 5, 7, 10, 11, 12, 13, 14, 16, 17, 18, 19, 20, 21, 24, 27, 28 or 29; deletions at one or more of positions 27, 28 or 29; or a deletion of amino acid 29 optionally combined with a C-terminal amide or ester in place of the C-terminal carboxylic acid group;
[0855] (G) Adding C-terminal extensions as described herein;
[0856] (H) Increasing half-life in circulation and/or extending the duration of action and/or delaying the onset of action, for example, through acylation or alkylation of the glucagon peptide, as described herein;
[0857] (I) Homodimerization or heterodimerization as described herein.

[0858] Other modifications include substitution of His at position 1 with a large, aromatic amino acid (e.g., Tyr, Phe, Trp or amino-Phe); Ser at position 2 with Ala; substitution of Tyr at position 10 with Val or Phe; substitution of Lys at position 12 with Arg; substitution of Asp at position 15 with Glu; substitution of Ser at position 16 with Thr or AIB.

[0859] Class 3 glucagon related peptides with GLP-1 activity that contain a non-conservative substitution of His at position 1 with a large, aromatic amino acid (e.g., Tyr) can retain GLP-1 activity provided that the alpha-helix is stabilized via an intramolecular bridge, e.g., such as any of those described herein.

[0860] Conjugates and Fusions

[0861] The Class 3 glucagon related peptide can be linked, optionally via covalent bonding and optionally via a linker, to a conjugate moiety.

[0862] The Class 3 glucagon related peptide also can be part of a fusion peptide or protein wherein a second peptide or polypeptide has been fused to a terminus, e.g., the carboxy terminus of the Class 3 glucagon related peptide.

[0863] More particularly, the fusion Class 3 glucagon related peptide may comprise a glucagon agonist of SEQ ID NO: 55, SEQ ID NO: 9 or SEQ ID NO: 10 further comprising an amino acid sequence of SEQ ID NO: 26 (GPSSGAPPPS), SEQ ID NO: 27 (KRNRNNIA) or SEQ ID NO: 28 (KRNR) linked to amino acid 29 of the glucagon peptide. In some embodiments, the amino acid sequence of SEQ ID NO: 26 (GPSSGAPPPS), SEQ ID NO: 27 (KRNRNNIA) or SEQ ID NO: 28 (KRNR) is bound to amino acid 29 of the Class 3 glucagon related peptide through a peptide bond. Applicants have discovered that in Class 3 glucagon related peptide fusion peptides comprising the C-terminal extension peptide of Exendin-4 (e.g., SEQ ID NO: 26 or SEQ ID NO: 29), substitution of the native threonine residue at position 29 with glycine dramatically increases GLP-1 receptor activity. This amino acid substitution can be used in conjunction with other modifications disclosed herein with regard to Class 3 glucagon related peptides to enhance the affinity of the glucagon analogs for the GLP-1 receptor. For example, the T29G substitution can be combined with the S16E and N20K amino acid substitutions, optionally with a lactam bridge between amino acids 16 and 20, and optionally with addition of a PEG chain as described herein. In some embodiments, a Class 3 glucagon related peptide comprises the sequence of SEQ ID NO: 64. In some embodiments, the Class 3 glucagon related peptide portion of the glucagon fusion peptide is selected from the group consisting of SEQ ID NO: 55, SEQ ID NO: 2, SEQ ID NO: 3, SEQ ID NO: 4, and SEQ ID NO: 5 wherein a PEG chain, when present at positions 17, 21, 24, or the C-terminal amino acid, or at both 21 and 24, is selected from the range of 500 to 40,000 Daltons. More particularly, in some embodiments, the Class 3 glucagon related peptide segment is selected from the group consisting of SEQ ID NO: 7, SEQ ID NO: 8, and SEQ ID NO: 63, wherein the PEG chain is selected from the range of 500 to 5,000. In some embodiments, the Class 3 glucagon related peptide is a fusion peptide comprising the sequence of SEQ ID NO: 55 and SEQ ID NO: 65 wherein the peptide of SEQ ID NO: 65 is linked to the carboxy terminus of SEQ ID NO: 55.

[0864] In accordance with some embodiments, an additional chemical modification of the Class 3 glucagon related peptide of SEQ ID NO: 10 bestows increased GLP-1 receptor potency to a point where the relative activity at the glucagon and GLP-1 receptors is virtually equivalent. Accordingly, in some embodiments, a Class 3 glucagon related peptide comprises a terminal amino acid comprising an amide group in place of the carboxylic acid group that is present on the native amino acid. The relative activity of the Class 3 glucagon related peptide at the respective glucagon and GLP-1 receptors can be adjusted by further modifications to the Class 3 glucagon related peptide to produce analogs demonstrating about 40% to about 500% or more of the activity of native glucagon at the glucagon receptor and about 20% to about 200% or more of the activity of native GLP-1 at the GLP-1 receptor, e.g. 50-fold, 100-fold or more increase relative to the normal activity of glucagon at the GLP-1 receptor. In some embodiments, the glucagon peptides described herein exhibit up to about 100%, 1000%, 10,000%, 100,000%, or 1,000,000% of the activity of native glucagon at the glucagon receptor. In some embodiments, the glucagon peptides described herein exhibit up to about 100%, 1000%, 10,000%, 100,000%, or 1,000,000% of the activity of native GLP-1 at the GLP-1 receptor.

[0865] Exemplary Embodiments

[0866] In accordance with some embodiments, a glucagon analog is provided comprising the sequence of SEQ ID NO: 55, wherein said analog differs from SEQ ID NO: 55 by 1 to 3 amino acids, selected from positions 1, 2, 3, 5, 7, 10, 11, 13, 14, 17, 18, 19, 21, 24, 27, 28, and 29, wherein said glucagon peptide exhibits at least 20% of the activity of native GLP-1 at the GLP-1 receptor.

[0867] In accordance with some embodiments a glucagon/GLP-1 receptor co-agonist is provided comprising the sequence: NH₂-His-Ser-Gln-Gly-Thr-Phe-Thr-Ser-Asp-Tyr-Ser-Lys-Tyr-Leu-Xaa-Xaa-Arg-Arg-Ala-Xaa-Asp-Phe-Val-Xaa-Trp-Leu-Met-Xaa-Xaa-R (SEQ ID NO: 33) wherein the Xaa at position 15 is selected from the group of amino acids consisting of Asp, Glu, cysteic acid, homoglutamic acid and homocysteic acid, Xaa at position 16 is selected from the group of amino acids consisting of Ser, Glu, Gln, homoglutamic acid and homocysteic acid, the Xaa at position 20 is Gln or Lys, the Xaa at position 24 is Gln or Glu, the Xaa at position 28 is Asn, Lys or an acidic amino acid, the Xaa at position 29 is Thr, Gly or an acidic amino acid, and R is COOH or CONH₂, with the proviso that when position 16 is serine, position 20 is Lys, or alternatively when position 16 is serine the position 24 is Glu and either position 20 or position 28 is Lys. In some embodiments the glucagon/GLP-1 receptor co-agonist comprises the sequence of SEQ ID NO: 33 wherein the amino acid at position 28 is aspartic acid and the amino acid at position 29 is glutamic acid. In another embodiment the amino acid at position 28 is the native asparagine, the amino acid at position 29 is glycine and the amino acid sequence of SEQ ID NO: 29 or SEQ ID NO: 65 is covalently linked to the carboxy terminus of SEQ ID NO: 33.

[0868] In some embodiments a co-agonist is provided comprising the sequence of SEQ ID NO: 33 wherein an additional acidic amino acid added to the carboxy terminus of the peptide. In a further embodiment the carboxy terminal amino acid of the glucagon analog has an amide in place of the carboxylic acid group of the natural amino acid. In some embodiments the glucagon analog comprises a sequence selected from the group consisting of SEQ ID NO: 40, SEQ ID NO: 41, SEQ ID NO: 42, SEQ ID NO: 43 and SEQ ID NO: 44.

[0869] In accordance with some embodiments a glucagon peptide analog of SEQ ID NO: 33 is provided, wherein said analog differs from SEQ ID NO: 33 by 1 to 3 amino acids, selected from positions 1, 2, 3, 5, 7, 10, 11, 13, 14, 17, 18, 19, 21 and 27, with the proviso that when the amino acid at position 16 is serine, either position 20 is lysine, or a lactam bridge is formed between the amino acid at position 24 and either the amino acid at position 20 or position 28. In accordance with some embodiments the analog differs from SEQ ID NO: 33 by 1 to 3 amino acids selected from positions 1, 2, 3, 21 and 27. In some embodiments the glucagon peptide analog of SEQ ID NO: 33 differs from that sequence by 1 to 2 amino acids, or in some embodiments by a single amino acid, selected form positions 1, 2, 3, 5, 7, 10, 11, 13, 14, 17, 18, 19, 21 and 27, with the proviso that when the amino acid at position 16 is serine, either position 20 is lysine, or a lactam bridge is formed between the amino acid at position 24 and either the amino acid at position 20 or position 28.

[0870] In accordance with another embodiment a relatively selective GLP-1 receptor agonist is provided comprising the sequence NH2-His-Ser-Xaa-Gly-Thr-Phe-Thr-Ser-Asp-Tyr-Ser-Lys-Tyr-Leu-Xaa-Xaa-Arg-Arg-Ala-Xaa-Asp-Phe-Val-Xaa-Trp-Leu-Met-Xaa-Xaa-R (SEQ ID NO: 53) wherein the Xaa at position 3 is selected from the group of amino acids consisting of Glu, Orn or Nle, the Xaa at position 15 is selected from the group of amino acids consisting of Asp, Glu, cysteic acid, homoglutamic acid and homocysteic acid, Xaa at position 16 is selected from the group of amino acids consisting of Ser, Glu, Gln, homoglutamic acid and homocysteic acid, the Xaa at position 20 is Gln or Lys, the Xaa at position 24 is Gln or Glu, the Xaa at position 28 is Asn, Lys or an acidic amino acid, the Xaa at position 29 is Thr, Gly or an acidic amino acid, and R is COOH, CONH₂, SEQ ID NO: 26 or SEQ ID NO: 29, with the proviso that when position 16 is serine, position 20 is Lys, or alternatively when position 16 is serine the position 24 is Glu and either position 20 or position 28 is Lys. In some embodiments the amino acid at position 3 is glutamic acid. In some embodiments the acidic amino acid substituted at position 28 and/or 29 is aspartic acid or glutamic acid. In some embodiments the glucagon peptide, including a co-agonist peptide, comprises the sequence of SEQ ID NO: 33 further comprising an additional acidic amino acid added to the carboxy terminus of the peptide. In a further embodiment the carboxy terminal amino acid of the glucagon analog has an amide in place of the carboxylic acid group of the natural amino acid.

[0871] In accordance with some embodiments a glucagon/GLP-1 receptor co-agonist is provided comprising a modified glucagon peptide selected from the group consisting of: NH₂-His-Ser-Gln-Gly-Thr-Phe-Thr-Ser-Asp-Tyr-Ser-Lys-Tyr-Leu-Xaa-Xaa-Arg-Arg-Ala-Xaa-Asp-Phe-Val-Xaa-Trp-Leu-Met-Xaa-Xaa-R (SEQ ID NO: 34), wherein the Xaa at position 15 is selected from the group of amino acids consisting of Asp, Glu, cysteic acid, homoglutamic acid and homocysteic acid, Xaa at position 16 is selected from the group of amino acids consisting of Ser, Glu, Gln, homoglutamic acid and homocysteic acid, the Xaa at position 20 is Gln or Lys, the Xaa at position 24 is Gln or Glu and the Xaa at position 28 is Asn, Asp or Lys, R is COOH or CONH₂, the Xaa at position 29 is Thr or Gly, and R is COOH, CONH₂, SEQ ID NO: 26 or SEQ ID NO: 29, with the proviso that when position 16 is serine, position 20 is Lys, or alternatively when position 16 is serine the position 24 is Glu and either position 20 or position 28 is Lys. In some embodiments R is CONH₂, the Xaa at position 15 is Asp, the Xaa at position 16 is selected from the group of amino acids consisting of Glu, Gln, homoglutamic acid and homocysteic acid, the Xaas at positions 20 and 24 are each Gln the Xaa at position 28 is Asn or Asp and the Xaa at position 29 is Thr. In some embodiments the Xaas at positions 15 and 16 are each Glu, the Xaas at positions 20 and 24 are each Gln, the Xaa at position 28 is Asn or Asp, the Xaa at position 29 is Thr and R is CONH₂.

[0872] It has been reported that certain positions of the native glucagon peptide can be modified while retaining at least some of the activity of the parent peptide. Accordingly, applicants anticipate that one or more of the amino acids located at positions at positions 2, 5, 7, 10, 11, 12, 13, 14, 17, 18, 19, 20, 21, 24, 27, 28 or 29 of the peptide of SEQ ID NO: 11 can be substituted with an amino acid different from that present in the native glucagon peptide, and still retain activity at the glucagon receptor. In some embodiments the methionine residue present at position 27 of the native peptide is changed to leucine or norleucine to prevent oxidative degradation of the peptide. In another embodiment the amino acid at position 20 is substituted with Lys, Arg, Orn or Citrullene and/or position 21 is substituted with Glu, homoglutamic acid or homocysteic acid.

[0873] In some embodiments a glucagon analog of SEQ ID NO: 20 is provided wherein 1 to 6 amino acids, selected from positions 1, 2, 5, 7, 10, 11, 13, 14, 17, 18, 19, 21, 27, 28 or 29 of the analog differ from the corresponding amino acid of SEQ ID NO: 1, with the proviso that when the amino acid at position 16 is serine, position 20 is Lys, or alternatively when position 16 is serine the position 24 is Glu and either position 20 or position 28 is Lys. In accordance with another embodiment a glucagon analog of SEQ ID NO: 20 is provided wherein 1 to 3 amino acids selected from positions 1, 2, 5, 7, 10, 11, 13, 14, 17, 18, 19, 20, 21, 27, 28 or 29 of the analog differ from the corresponding amino acid of SEQ ID NO: 1. In another embodiment, a glucagon analog of SEQ ID NO: 8, SEQ ID NO: 9 or SEQ ID NO: 11 is provided wherein 1 to 2 amino acids selected from positions 1, 2, 5, 7, 10, 11, 13, 14, 17, 18, 19, 20 or 21 of the analog differ from the corresponding amino acid of SEQ ID NO: 1, and in a further embodiment the one to two differing amino acids represent conservative amino acid substitutions relative to the amino acid present in the native glucagon sequence (SEQ ID NO: 1). In some embodiments a glucagon peptide of SEQ ID NO: 12, SEQ ID NO: 13, SEQ ID NO: 14 or SEQ ID NO: 15 is provided wherein the glucagon peptide further comprises one, two or three amino acid substitutions at positions selected from positions 2, 5, 7, 10, 11, 13, 14, 17, 18, 19, 20, 21, 27 or 29. In some embodiments the substitutions at positions 2, 5, 7, 10, 11, 13, 14, 16, 17, 18, 19, 20, 21, 27 or 29 are conservative amino acid substitutions.

[0874] In accordance with some embodiments a glucagon/GLP-1 receptor co-agonist is provided comprising a variant of the sequence of SEQ ID NO 33, wherein 1 to 10 amino acids selected from positions 16, 17, 18, 20, 21, 23, 24, 27, 28 and 29, respectively, of the variant differ from the corresponding amino acid of SEQ ID NO: 1. In accordance with some embodiments a variant of the sequence of SEQ ID NO 33 is provided wherein the variant differs from SEQ ID NO: 33 by one or more amino acid substitutions selected from the group consisting of Gln17, Ala18, Glu21, Ile23, Ala24, Val27 and Gly29. In accordance with some embodiments a glucagon/GLP-1 receptor co-agonist is provided comprising variants of the sequence of SEQ ID NO 33, wherein 1 to 2 amino acids selected from positions 17-26 of the variant differ from the corresponding amino acid of SEQ ID NO: 1. In accordance with some embodiments a variant of the sequence of SEQ ID NO 33 is provided wherein the variant differs from SEQ ID NO: 33 by an amino acid substitution selected from the group consisting of Gln17, Ala18, Glu21, 11e23 and Ala24. In accordance with some embodiments a variant of the sequence of SEQ ID NO 33 is provided wherein the variant differs from SEQ ID NO: 33 by an amino acid substitution at position 18 wherein the substituted amino acid is selected from the group consisting of Ala, Ser, Thr, and Gly. In accordance with some embodiments a variant of the sequence of SEQ ID NO 33 is provided wherein the variant differs from SEQ ID NO: 33 by an amino acid substitution of Ala at position 18. Such variations are encompassed by SEQ ID NO: 55. In another embodiment a glucagon/GLP-1 receptor co-agonist is provided comprising variants of the sequence of SEQ ID NO 33, wherein 1 to 2 amino acids selected from positions 17-22 of the variant differ from the corresponding amino acid of SEQ ID NO: 1, and in a further embodiment a variant of SEQ ID NO 33 is provided wherein the variant differs from SEQ ID NO: 33 by for 2 amino acid substitutions at positions 20 and 21. In accordance with some embodiments a glucagon/GLP-1 receptor co-agonist is provided comprising the sequence: NH2-His-Ser-Gln-Gly-Thr-Phe-Thr-Ser-Asp-Tyr-Ser-Lys-Tyr-Leu-Xaa-Xaa-Arg-Arg-Ala-Xaa-Xaa-Phe-Val-Xaa-Trp-Leu-Met-Xaa-Xaa-R (SEQ ID NO: 51), wherein the Xaa at position 15 is Asp, Glu, cysteic acid, homoglutamic acid or homocysteic acid, the Xaa at position 16 is Ser, Glu, Gln, homoglutamic acid or homocysteic acid, the Xaa at position 20 is Gln, Lys, Arg, Orn or citrulline, the Xaa at position 21 is Asp, Glu, homoglutamic acid or homocysteic acid, the Xaa at position 24 is Gln or Glu, the Xaa at position 28 is Asn, Lys or an acidic amino acid, the Xaa at position 29 is Thr or an acid amino acid and R is COOH or CONH₂. In some embodiments R is CONH₂. In accordance with some embodiments a glucagon/GLP-1 receptor co-agonist is provided comprising a variant of SEQ ID NO: 11, SEQ ID NO: 12, SEQ ID NO: 13, SEQ ID NO: 14, SEQ ID NO: 15, SEQ ID NO: 47, SEQ ID NO: 48 or SEQ ID NO: 49, wherein the variant differs from said sequence by an amino acid substitution at position 20. In some embodiments the amino acid substitution is selected form the group consisting of Lys, Arg, Orn or citrulline for position 20.

[0875] In some embodiments a glucagon agonist is provided comprising an analog peptide of SEQ ID NO: 34 wherein the analog differs from SEQ ID NO: 34 by having an amino acid other than serine at position 2. In some embodiments the serine residue is substituted with aminoisobutyric acid, D-alanine, and in some embodiments the serine residue is substituted with aminoisobutyric acid. Such modifications suppresses cleavage by dipeptidyl peptidase IV while retaining the inherent potency of the parent compound (e.g. at least 75, 80, 85, 90, 95% or more of the potency of the parent compound). In some embodiments the solubility of the analog is increased, for example, by introducing one, two, three or more charged amino acid(s) to the C-terminal portion of native glucagon, preferably at a position C-terminal to position 27. In exemplary embodiments, one, two, three or all of the charged amino acids are negatively charged. In another embodiment the analog further comprises an acidic amino acid substituted for the native amino acid at position 28 or 29 or an acidic amino acid added to the carboxy terminus of the peptide of SEQ ID NO: 34.

[0876] In some embodiments the glucagon analogs disclosed herein are further modified at position 1 or 2 to reduce susceptibility to cleavage by dipeptidyl peptidase IV. In some embodiments a glucagon analog of SEQ ID NO: 9, SEQ ID NO: 11, SEQ ID NO: 12, SEQ ID NO: 13, SEQ ID NO: 14 or SEQ ID NO: 15 is provided wherein the analog differs from the parent molecule by a substitution at position 2 and exhibits reduced susceptibility (i.e., resistance) to cleavage by dipeptidyl peptidase IV. More particularly, in some embodiments position 2 of the analog peptide is substituted with an amino acid selected from the group consisting of D-serine, D-alanine, valine, amino n-butyric acid, glycine, N-methyl serine and aminoisobutyric acid. In some embodiments position 2 of the analog peptide is substituted with an amino acid selected from the group consisting of D-serine, D-alanine, glycine, N-methyl serine and aminoisobutyric acid. In another embodiment position 2 of the analog peptide is substituted with an amino acid selected from the group consisting of D-serine, glycine, N-methyl serine and aminoisobutyric acid. In some embodiments the amino acid at position 2 is not D-serine. In some embodiments the glucagon peptide comprises the sequence of SEQ ID NO: 21 or SEQ ID NO: 22.

[0877] In some embodiments a glucagon analog of SEQ ID NO: 9, SEQ ID NO: 11, SEQ ID NO: 12, SEQ ID NO: 13, SEQ ID NO: 14 or SEQ ID NO: 15 is provided wherein the analog differs from the parent molecule by a substitution at position 1 and exhibits reduced susceptibility (i.e., resistance) to cleavage by dipeptidyl peptidase IV. More particularly, position 1 of the analog peptide is substituted with an amino acid selected from the group consisting of D-histidine, alpha, alpha-dimethyl imidiazole acetic acid (DMIA), N-methyl histidine, alpha-methyl histidine, imidazole acetic acid, desaminohistidine, hydroxyl-histidine, acetyl-histidine and homo-histidine. In another embodiment a glucagon agonist is provided comprising an analog peptide of SEQ ID NO: 34 wherein the analog differs from SEQ ID NO: 34 by having an amino acid other than histidine at position 1. In some embodiments the solubility of the analog is increased, for example, by introducing one, two, three or more charged amino acid(s) to the C-terminal portion of native glucagon, preferably at a position C-terminal to position 27. In exemplary embodiments, one, two, three or all of the charged amino acids are negatively charged. In another embodiment the analog further comprises an acidic amino acid substituted for the native amino acid at position 28 or 29 or an acidic amino acid added to the carboxy terminus of the peptide of SEQ ID NO: 34. In some embodiments the acidic amino acid is aspartic acid or glutamic acid.

[0878] In some embodiments the glucagon/GLP-1 receptor co-agonist comprises a sequence of SEQ ID NO: 20 further comprising an additional carboxy terminal extension of one amino acid or a peptide selected from the group consisting of SEQ ID NO: 26, SEQ ID NO: 27 and SEQ ID NO: 28. In the embodiment wherein a single amino acid is added to the carboxy terminus of SEQ ID NO: 20, the amino acid is typically selected from one of the 20 common amino acids, and in some embodiments the additional carboxy terminus amino acid has an amide group in place of the carboxylic acid of the native amino acid. In some embodiments the additional amino acid is selected from the group consisting of glutamic acid, aspartic acid and glycine.

[0879] In an alternative embodiment a glucagon/GLP-1 receptor co-agonist is provided wherein the peptide comprises at least one lactam ring formed between the side chain of a glutamic acid residue and a lysine residue, wherein the glutamic acid residue and a lysine residue are separated by three amino acids. In some embodiments the carboxy terminal amino acid of the lactam bearing glucagon peptide has an amide group in place of the carboxylic acid of the native amino acid. More particularly, in some embodiments a glucagon and GLP-1 co-agonist is provided comprising a modified glucagon peptide selected from the group consisting of:

(SEQ ID NO: 66)
NH₂-His-Ser-Gln-Gly-Thr-Phe-Thr-Ser-Asp-Tyr-Ser-
Lys-Tyr-Leu-Asp-Glu-Arg-Arg-Ala-Gln-Asp-Phe-Val-
Gln-Trp-Leu-Met-Xaa-Xaa-R
(SEQ ID NO: 67)
NH₂-His-Ser-Gln-Gly-Thr-Phe-Thr-Ser-Asp-Tyr-Ser-
Lys-Tyr-Leu-Asp-Glu-Arg-Arg-Ala-Lys-Asp-Phe-Val-
Gln-Trp-Leu-Met-Xaa-Xaa-R
(SEQ ID NO: 68)
NH₂-His-Ser-Gln-Gly-Thr-Phe-Thr-Ser-Asp-Tyr-Ser-
Lys-Tyr-Leu-Asp-Ser-Arg-Arg-Ala-Lys-Asp-Phe-Val-
Glu-Trp-Leu-Met-Xaa-Xaa-R
(SEQ ID NO: 69)
NH₂-His-Ser-Gln-Gly-Thr-Phe-Thr-Ser-Asp-Tyr-Ser-
Lys-Tyr-Leu-Asp-Ser-Arg-Arg-Ala-Gln-Asp-Phe-Val-
Glu-Trp-Leu-Met-Lys-Xaa-R
(SEQ ID NO: 16)
NH₂-His-Ser-Gln-Gly-Thr-Phe-Thr-Ser-Asp-Tyr-Ser-
Lys-Tyr-Leu-Asp-Glu-Arg-Arg-Ala-Lys-Asp-Phe-Val-
Glu-Trp-Leu-Met-Asn-Thr-R
(SEQ ID NO: 17)
NH₂-His-Ser-Gln-Gly-Thr-Phe-Thr-Ser-Asp-Tyr-Ser-
Lys-Tyr-Leu-Asp-Glu-Arg-Arg-Ala-Gln-Asp-Phe-Val-
Glu-Trp-Leu-Met-Lys-Thr-R
(SEQ ID NO: 18)
NH₂-His-Ser-Gln-Gly-Thr-Phe-Thr-Ser-Asp-Tyr-Ser-
Lys-Tyr-Leu-Asp-Glu-Arg-Arg-Ala-Lys-Asp-Phe-Val-
Glu-Trp-Leu-Met-Lys-Thr-R

wherein Xaa at position 28=Asp, or Asn, the Xaa at position 29 is Thr or Gly, R is selected from the group consisting of COOH, CONH₂, glutamic acid, aspartic acid, glycine, SEQ ID NO: 26, SEQ ID NO: 27 and SEQ ID NO: 28, and a lactam bridge is formed between Lys at position 12 and Glu at position 16 for SEQ ID NO: 66, between Glu at position 16 and Lys at position 20 for SEQ ID NO: 67, between Lys at position 20 and Glu at position 24 for SEQ ID NO: 68, between Glu at position 24 and Lys at position 28 for SEQ ID NO: 69, between Lys at position 12 and Glu at position 16 and between Lys at position 20 and Glu at position 24 for SEQ ID NO: 16, between Lys at position 12 and Glu at position 16 and between Glu at position 24 and Lys at position 28 for SEQ ID NO: 17 and between Glu at position 16 and Lys at position 20 and between Glu at position 24 and Lys at position 28 for SEQ ID NO: 18. In some embodiments R is selected from the group consisting of COOH, CONH₂, glutamic acid, aspartic acid, glycine, the amino acid at position 28 is Asn, and the amino acid at position 29 is threonine. In some embodiments R is CONH₂, the amino acid at position 28 is Asn and the amino acid at position 29 is threonine. In another embodiment R is selected from the group consisting of SEQ ID NO: 26, SEQ ID NO: 29 and SEQ ID NO: 65 and the amino acid at position 29 is glycine.

[0880] In a further embodiment the glucagon/GLP-1 receptor co-agonist is selected from the group consisting of SEQ ID NO: 11, SEQ ID NO: 12, SEQ ID NO: 13, SEQ ID NO: 14, SEQ ID NO: 15, SEQ ID NO: 16, SEQ ID NO: 17 and SEQ ID NO: 18, wherein the peptide further comprises an additional carboxy terminal extension of one amino acid or a peptide selected from the group consisting of SEQ ID NO: 26, SEQ ID NO: 27 and SEQ ID NO: 28. In some embodiments the terminal extension comprises the sequence of SEQ ID NO: 26, SEQ ID NO: 29 or SEQ ID NO: 65 and the glucagon peptide comprises the sequence of SEQ ID NO: 55. In some embodiments the glucagon/GLP-1 receptor co-agonist comprises the sequence of SEQ ID NO: 33 wherein the amino acid at position 16 is glutamic acid, the amino acid at position 20 is lysine, the amino acid at position 28 is asparagine and the amino acid sequence of SEQ ID No: 26 or SEQ ID NO: 29 is linked to the carboxy terminus of SEQ ID NO: 33.

[0881] In the embodiment wherein a single amino acid is added to the carboxy terminus of SEQ ID NO: 20, the amino acid is typically selected from one of the 20 common amino acids, and in some embodiments the amino acid has an amide group in place of the carboxylic acid of the native amino acid. In some embodiments the additional amino acid is selected from the group consisting of glutamic acid and aspartic acid and glycine. In the embodiments wherein the glucagon agonist analog further comprises a carboxy terminal extension, the carboxy terminal amino acid of the extension, in some embodiments, ends in an amide group or an ester group rather than a carboxylic acid.

[0882] In another embodiment the glucagon/GLP-1 receptor co-agonist comprises the sequence: NH₂-His-Ser-Gln-Gly-Thr-Phe-Thr-Ser-Asp-Tyr-Ser-Lys-Tyr-Leu-Asp-Glu-Arg-Arg-Ala-Gln-Asp-Phe-Val-Gln-Trp-Leu-Met-Asn-Thr-Xaa-CONH₂ (SEQ ID NO: 19), wherein the Xaa at position 30 represents any amino acid. In some embodiments Xaa is selected from one of the 20 common amino acids, and in some embodiments the amino acid is glutamic acid, aspartic acid or glycine. The solubility of this peptide can be further improved by covalently linking a PEG chain to the side chain of amino acid at position 17, 21, 24 or 30 of SEQ ID NO: 19. In a further embodiment the peptide comprises an additional carboxy terminal extension of a peptide selected from the group consisting of SEQ ID NO: 26, SEQ ID NO: 27 and SEQ ID NO: 28. In accordance with some embodiments the glucagon/GLP-1 receptor co-agonist comprises the sequence of SEQ ID NO: 30, SEQ ID NO: 31 and SEQ ID NO: 32.

[0883] Additional site specific modifications internal to the glucagon sequence of SEQ ID NO: 11, SEQ ID NO: 12, SEQ ID NO: 13, SEQ ID NO: 14, SEQ ID NO: 15, SEQ ID NO: 16, SEQ ID NO: 17, SEQ ID NO: 18, SEQ ID NO: 19 and SEQ ID NO: 64 can be made to yield a set of glucagon agonists that possess variable degrees of GLP-1 agonism.

[0884] Accordingly, peptides that possess virtually identical in vitro potency at each receptor have been prepared and characterized. Similarly, peptides with tenfold selectively enhanced potency at each of the two receptors have been identified and characterized. As noted above substitution of the serine residue at position 16 with glutamic acid enhances the potency of native glucagon at both the Glucagon and GLP-1 receptors, but maintains approximately a tenfold selectivity for the glucagon receptor. In addition by substituting the native glutamine at position 3 with glutamic acid (SEQ ID NO: 22) generates a glucagon analog that exhibits approximately a tenfold selectivity for the GLP-1 receptor.

[0885] The solubility of the glucagon/GLP-1 co-agonist peptides can be further enhanced in aqueous solutions at physiological pH, while retaining the high biological activity relative to native glucagon by the introduction of hydrophilic groups at positions 16, 17, 21, and 24 of the peptide, or by the addition of a single modified amino acid (i.e., an amino acid modified to comprise a hydrophilic group) at the carboxy terminus of the glucagon/GLP-1 co-agonist peptide. In accordance with some embodiments the hydrophilic group comprises a polyethylene (PEG) chain. More particularly, in some embodiments the glucagon peptide comprises the sequence of SEQ ID NO: 10, SEQ ID NO: 11, SEQ ID NO: 12, SEQ ID NO: 13, SEQ ID NO: 14, SEQ ID NO: 15, SEQ ID NO: 16, SEQ ID NO: 17 or SEQ ID NO: 18 wherein a PEG chain is covalently linked to the side chain of an amino acids at position 16, 17, 21, 24, 29 or the C-terminal amino acid of the glucagon peptide, with the proviso that when the peptide comprises SEQ ID NO: 10, SEQ ID NO: 11, SEQ ID NO: 12 or SEQ ID NO: 13 the polyethylene glycol chain is covalently bound to an amino acid residue at position 17, 21 or 24, when the peptide comprises SEQ ID NO: 14 or SEQ ID NO: 15 the polyethylene glycol chain is covalently bound to an amino acid residue at position 16, 17 or 21, and when the peptide comprises SEQ ID NO: 16, SEQ ID NO: 17 or SEQ ID NO: 18 the polyethylene glycol chain is covalently bound to an amino acid residue at position 17 or 21.

[0886] In some embodiments the glucagon peptide comprises the sequence of SEQ ID NO: 11, SEQ ID NO: 12 or SEQ ID NO: 13, wherein a PEG chain is covalently linked to the side chain of an amino acids at position 17, 21, 24, or the C-terminal amino acid of the glucagon peptide, and the carboxy terminal amino acid of the peptide has an amide group in place of the carboxylic acid group of the native amino acid. In some embodiments the glucagon/GLP-1 receptor co-agonist peptide comprises a sequence selected from the group consisting of SEQ ID NO: 12, SEQ ID NO: 13, SEQ ID NO: 14, SEQ ID NO: 15, SEQ ID NO: 16, SEQ ID NO: 17, SEQ ID NO: 18 and SEQ ID NO: 19, wherein a PEG chain is covalently linked to the side chain of an amino acid at position 17, 21 or 24 of SEQ ID NO: 12, SEQ ID NO: 13 and SEQ ID NO: 19, or at position 16, 17 or 21 of SEQ ID NO: 14 and SEQ ID NO: 15 or at position 17 or 21 of SEQ ID NO: 16, SEQ ID NO: 17 and SEQ ID NO: 18 of the glucagon peptide. In another embodiment the glucagon/GLP-1 receptor co-agonist peptide comprises the sequence of SEQ ID NO: 11 or SEQ ID NO: 19, wherein a PEG chain is covalently linked to the side chain of an amino acids at position 17, 21 or 24 or the C-terminal amino acid of the glucagon peptide.

[0887] In accordance with some embodiments, and subject to the proviso limitations described in the preceding paragraphs, the glucagon co-agonist peptide is modified to contain one or more amino acid substitution at positions 16, 17, 21, 24, or 29 or the C-terminal amino acid, wherein the native amino acid is substituted with an amino acid having a side chain suitable for crosslinking with hydrophilic moieties, including for example, PEG. The native peptide can be substituted with a naturally occurring amino acid or a synthetic (non-naturally occurring) amino acid. Synthetic or non-naturally occurring amino acids refer to amino acids that do not naturally occur in vivo but which, nevertheless, can be incorporated into the peptide structures described herein. Alternatively, the amino acid having a side chain suitable for crosslinking with hydrophilic moieties, including for example, PEG, can be added to the carboxy terminus of any of the glucagon analogs disclosed herein. In accordance with some embodiments an amino acid substitution is made in the glucagon/GLP-1 receptor co-agonist peptide at a position selected from the group consisting of 16, 17, 21, 24, or 29 replacing the native amino acid with an amino acid selected from the group consisting of lysine, cysteine, ornithine, homocysteine and acetyl phenylalanine, wherein the substituting amino acid further comprises a PEG chain covalently bound to the side chain of the amino acid. In some embodiments a glucagon peptide selected form the group consisting of SEQ ID NO: 12, SEQ ID NO: 13, SEQ ID NO: 14, SEQ ID NO: 15, SEQ ID NO: 16, SEQ ID NO: 17, SEQ ID NO: 18, and SEQ ID NO: 19 is further modified to comprise a PEG chain is covalently linked to the side chain of an amino acid at position 17 or 21 of the glucagon peptide. In some embodiments the pegylated glucagon/GLP-1 receptor co-agonist further comprises the sequence of SEQ ID NO: 26, SEQ ID NO: 27 or SEQ ID NO: 29.

[0888] In another embodiment the glucagon peptide comprises the sequence of SEQ ID NO: 55 or SEQ ID NO: 56, further comprising a C-terminal extension of SEQ ID NO: 26, SEQ ID NO: 29 or SEQ ID NO: 65 linked to the C-terminal amino acid of SEQ ID NO: 55 or SEQ ID NO: 56, and optionally further comprising a PEG chain covalently linked to the side chain of an amino acids at position 17, 18, 21, 24 or 29 or the C-terminal amino acid of the peptide. In another embodiment the glucagon peptide comprises the sequence of SEQ ID NO: 55 or SEQ ID NO: 56, wherein a PEG chain is covalently linked to the side chain of an amino acids at position 21 or 24 of the glucagon peptide and the peptide further comprises a C-terminal extension of SEQ ID NO: 26, or SEQ ID NO: 29.

[0889] In another embodiment the glucagon peptide comprises the sequence of SEQ ID NO: 55, or SEQ ID NO: 33 or SEQ ID NO: 34, wherein an additional amino acid is added to the carboxy terminus of SEQ ID NO: 33 or SEQ ID NO: 34, and a PEG chain is covalently linked to the side chain of the added amino acid. In a further embodiment, the pegylated glucagon analog further comprises a C-terminal extension of SEQ ID NO: 26 or SEQ ID NO: 29 linked to the C-terminal amino acid of SEQ ID NO: 33 or SEQ ID NO: 34. In another embodiment the glucagon peptide comprises the sequence of SEQ ID NO: 19, wherein a PEG chain is covalently linked to the side chain of the amino acid at position 30 of the glucagon peptide and the peptide further comprises a C-terminal extension of SEQ ID NO: 26 or SEQ ID NO: 29 linked to the C-terminal amino acid of SEQ ID NO: 19.

[0890] The polyethylene glycol chain may be in the form of a straight chain or it may be branched. In accordance with some embodiments the polyethylene glycol chain has an average molecular weight selected from the range of about 500 to about 10,000 Daltons. In some embodiments the polyethylene glycol chain has an average molecular weight selected from the range of about 1,000 to about 5,000 Daltons. In an alternative embodiment the polyethylene glycol chain has an average molecular weight selected from the range of about 10,000 to about 20,000 Daltons. In accordance with some embodiments the pegylated glucagon peptide comprises two or more polyethylene glycol chains covalently bound to the glucagon peptide wherein the total molecular weight of the glucagon chains is about 1,000 to about 5,000 Daltons. In some embodiments the pegylated glucagon agonist comprises a peptide consisting of SEQ ID NO: 5 or a glucagon agonist analog of SEQ ID NO: 5, wherein a PEG chain is covalently linked to the amino acid residue at position 21 and at position 24, and wherein the combined molecular weight of the two PEG chains is about 1,000 to about 5,000 Daltons.

[0891] In certain exemplary embodiments, the glucagon peptide comprises the amino acid sequence of SEQ ID NO: 1 with up to ten amino acid modifications and comprises an amino acid at position 10 which is acylated or alkylated. In some embodiments, the amino acid at position 10 is acylated or alkylated with a C4 to C30 fatty acid. In certain aspects, the amino acid at position 10 comprises an acyl group or an alkyl group which is non-native to a naturally-occurring amino acid.

[0892] In certain embodiments, the glucagon peptide comprising an amino acid at position 10 which is acylated or alkylated comprises a stabilized alpha helix. Accordingly, in certain aspects, the glucagon peptide comprises an acyl or alkyl group as described herein and an intramolecular bridge, e.g., a covalent intramolecular bridge (e.g., a lactam bridge) between the side chains of an amino acid at position i and an amino acid at position i+4, wherein i is 12, 16, 20, or 24. Alternatively or additionally, the glucagon peptide comprises an acyl or alkyl group as described herein and one, two, three or more of positions 16, 20, 21 and/or 24 of the glucagon peptide are substituted with an α,α-disubstituted amino acid, e.g., AIB. In some instances, the non-native glucagon peptide comprises Glu at position 16 and Lys at position 20, wherein optionally a lactam bridge lnkes the Glu and the Lys, and, optionally, the glucagon peptide further comprises one or more modifications selected from the group consisting of: Gln at position 17, Ala at position 18, Glu at position 21, Ile at position 23, and Ala at position 24.

[0893] Also, in any of the embodiments, wherein the glucagon peptide comprises an amino acid at position 10 which is acylated or alkylated, the glucagon peptide can further comprise a C-terminal amide in lieu of the C-terminal alpha carboxylate.

[0894] In some embodiments, the glucagon peptide comprising an acyl or alkyl group as described herein further comprises an amino acid substitution at position 1, at position 2, or at positions 1 and 2, wherein the amino acid substitution(s) achieve DPP-IV protease resistance. For example, the His at position 1 may be substituted with an amino acid selected from the group consisting of: D-histidine, alpha, alpha-dimethyl imidiazole acetic acid (DMIA), N-methyl histidine, alpha-methyl histidine, imidazole acetic acid, desaminohistidine, hydroxyl-histidine, acetyl-histidine and homo-histidine. Alternatively or additionally, the Ser at position 2 may be substituted with an amino acid selected from the group consisting of: D-serine, alanine, D-alanine, valine, glycine, N-methyl serine, N-methyl alanine, and amino isobutyric acid. In some embodiments the amino acid at position 2 is not D-serine.

[0895] The glucagon peptide comprising the amino acid at position 10 which is acylated or alkylated as described herein can comprise any amino acid sequence which is substantially related to SEQ ID NO: 1. For instance, the glucagon peptide comprises SEQ ID NO: 1 with up to 10 amino acid modifications (e.g., 0, 1, 2, 3, 4, 5, 6, 7, 8, 9, 10 modifications). In certain embodiments, the amino acid sequence of the acylated or alkylated glucagon peptide is greater than 25% identical to SEQ ID NO: 1 (e.g., greater than 30%, 35%, 40%, 50%, 60%, 70% 75%, 80%, 85%, 90%, 95%, 96%, 97%, 98%, 99%, or nearly 100% identical to SEQ ID NO: 1). In certain specific embodiments, the glucagon peptide is one which comprises SEQ ID NOs: 55 with an amino acid at position 10 acylated or alkylated as described herein. The glucagon peptide can be any of SEQ ID NOs: 55, 55 with 1 or 2 amino acid modifications, 2-4,9-18, 20, 23-25, 33, 40-44, 53, 56, 61, 62, 64, 66-514, and 534.

[0896] The acyl or alkyl group of these embodiments may be any acyl or alkyl group described herein. For example, the acyl group may be a C4 to C30 (e.g., C8 to C24) fatty acyl group and the alkyl group may be a C4 to C30 (e.g., C8 to C24) alkyl group.

[0897] The amino acid to which the acyl or alkyl group is attached may be any of the amino acids described herein, e.g., an amino acid of any of Formula I (e.g., Lys), Formula II, and Formula III.

[0898] In some embodiments, the acyl group or alkyl group is directly attached to the amino acid at position 10. In some embodiments, the acyl or alkyl group is attached to the amino acid at position 10 via a spacer, such as, for example, a spacer which is 3 to 10 atoms in length, e.g., an amino acid or dipeptide. Suitable spacers for purposes of attaching an acyl or alkyl group are described herein.

[0899] In accordance with some embodiments, the Class 3 glucagon related peptide may be an analog of any of the foregoing Class 3 glucagon related peptides as described herein, which analog exhibits agonist activity at the GIP receptor. The activity level of the analog at the glucagon receptor, the GLP-1 receptor, and the GIP receptor, the potency at each of these receptors, and the selectivity for each of these receptors may be in accordance with the teachings of Class 2 glucagon related peptides described herein. See, the teachings under the subsection of the Class 2 glucagon related peptide section entitled “Activity.”

[0900] In some embodiments of the invention, an analog of a glucagon peptide, which analog exhibits agonist activity at the GIP receptor, is provided. The analog in certain embodiments comprises the amino acid sequence of SEQ ID NO: 1 with at least one amino acid modification (optionally, up to 15 amino acid modifications), and an extension of 1 to 21 amino acids C-terminal to the amino acid at position 29 of the analog.

[0901] In certain aspects, the analogs comprise at least one amino acid modification and up to 15 amino acid modifications (e.g., 1, 2, 3, 4, 5, 6, 7, 8, 9, 10, 11, 12, 13, 14, 15 amino acid modifications, up to 10 amino acid modifications). In certain embodiments, the analogs comprise at least one amino acid modification at up to 10 amino acid modifications and additional conservative amino acid modifications. Conservative amino acid modifications are described herein.

[0902] In some aspects, at least one of the amino acid modifications confers a stabilized alpha helix structure in the C-terminal portion of the analog. Modifications which achieve a stabilized alpha helix structure are described herein. See, for example, the teachings under the section entitled Stabilization of the alpha helix/Intramolecular bridges. In some aspects, the analog comprises an intramolecular bridge (e.g., a covalent intramolecular bridge, a non-covalent intramolecular bridge) between the side chains of two amino acids of the analog. In certain aspects, an intramolecular bridge links the side chains of the amino acids at positions i and i+4, wherein i is 12, 13, 16, 17, 20, or 24. In other aspects, an intramolecular bridge connects the side chains of the amino acids at positions j and j+3, wherein j is 17, or at positions k and k+7″ wherein k is any integer between 12 and 22. In certain embodiments, the intramolecular bridge is a covalent intramolecular bridge, e.g., a lactam bridge. In specific aspects, the lactam bridge connects the side chains of the amino acids at positions 16 and 20. In particular aspects, one of the amino acids at positions 16 and 20 is a positive-charged amino acid and the other is a negative-charged amino acid. For example, the analog can comprise a lactam bridge connecting the side chains of a Glu at position 16 and a Lys at position 20. In other aspects, the negative-charged amino acid and the positive-charged amino acid form a salt bridge. In this instance, the intramolecular bridge is a non-covalent intramolecular bridge.

[0903] In particular aspects, the amino acid modification which confers a stabilized alpha helix is an insertion or substitution of an amino acid of SEQ ID NO: 1 with an α,α-disubstituted amino acid. Suitable α,α-disubstituted amino acids for purposes of stabilizing the alpha helix are described herein and include, for example, AIB. In some aspects, one, two, three, or more of the amino acids at positions 16, 20, 21, and 24 of SEQ ID NO: 1 are substituted with an α,α-disubstituted amino acid, e.g., AIB. In particular embodiments, the amino acid at position 16 is AIB.

[0904] The analog which exhibits agonist activity at the GIP receptor can comprise additional modifications, such as any of those described herein. For instance, the amino acid modifications may increase or decrease activity at one or both of the GLP-1 receptor and glucagon receptor. The amino acid modifications may increase stability of the peptide, e.g., increase resistance to DPP-IV protease degradation, stabilize the bond between amino acids 15 and 16. The amino acid modifications may increase the solubility of the peptide and/or alter the time of action of the analog at any of the GIP, glucagon, and GLP-1 receptors. A combination of any of these types of modifications may be present in the analogs which exhibit agonist activity at the GIP receptor.

[0905] Accordingly, in some aspects, the analog comprises the amino acid sequence of SEQ ID NO: 1 with one or more of: Gln at position 17, Ala at position 18, Glu at position 21, Ile at position 23, and Ala or Cys at position 24, or conservative amino acid substitutions thereof. In some aspects, the analog comprises a C-terminal amide in place of the C-terminal alpha carboxylate. In certain embodiments, the analog comprises an amino acid substitution at position 1, position 2, or positions 1 and 2, which substitution(s) achieve DPP-IV protease resistance. Suitable amino acid substitutions are described herein. For example, DMIA at position 1 and/or d-Ser or AIB at position 2. In some embodiments, the amino acid at position 2 is not D-serine.

[0906] Additionally or alternatively, the analog may comprise one or a combination of: (a) Ser at position 2 substituted with Ala; (b) Gln at position 3 substituted with Glu or a glutamine analog; (c) Thr at position 7 substituted with a Ile; (d) Tyr at position 10 substituted with Trp or an amino acid comprising an acyl or alkyl group which is non-native to a naturally-occurring amino acid; (e) Lys at position 12 substituted with Ile; (f) Asp at position 15 substituted with Glu; (g) Ser at position 16 substituted with Glu; (h) Gln at position 20 substituted with Ser, Thr, Ala, AIB; (i) Gln at position 24 substituted with Ser, Thr, Ala, AIB; (j) Met at position 27 substituted with Leu or Nle; (k) Asn at position 29 substituted with a charged amino acid, optionally, Asp or Glu; and (1) Thr at position 29 substituted with Gly or a charged amino acid, optionally, Asp or Glu.

[0907] In certain aspects, the analog does not comprise an amino acid modification at position 1 which modification confers GIP agonist activity. In some aspects, the amino acid at position 1 is not a large, aromatic amino acid, e.g., Tyr. In some embodiments, the amino acid at position 1 is an amino acid comprising an imidazole ring, e.g., His, analogs of His. In certain embodiments, the analog is not any of the compounds disclosed in U.S. Patent Application No. 61/151,349. In certain aspects, the analog comprises the amino acid sequence of any of SEQ ID NOs: 657-669.

[0908] With regard to the analogs which exhibit agonist activity at the GIP receptor, the analog comprises an extension of 1-21 amino acids (e.g., 5-19, 7-15, 9-12 amino acids). The extension of the analog may comprise any amino acid sequence, provided that the extension is 1 to 21 amino acids. In some aspects, the extension is 7 to 15 amino acids and in other aspects, the extension is 9 to 12 amino acids. In some embodiments, the extension comprises (i) the amino acid sequence of SEQ ID NO: 26 or 674, (ii) an amino acid sequence which has high sequence identity (e.g., at least 80%, 85%, 90%, 95%, 98%, 99%) with the amino acid sequence of SEQ ID NO: 26 or 674, or (iii) the amino acid sequence of (i) or (ii) with one or more conservative amino acid modifications.

[0909] In some embodiments, at least one of the amino acids of the extension is acylated or alkylated. The amino acid comprising the acyl or alkyl group may be located at any position of extension of the analog. In certain embodiments, the acylated or alkylated amino acid of the extension is located at one of positions 37, 38, 39, 40, 41, or 42 (according to the numbering of SEQ ID NO: 1) of the analog. In certain embodiments, the acylated or alkylated amino acid is located at position 40 of the analog.

[0910] In exemplary embodiments, the acyl or alkyl group is an acyl or alkyl group which is non-native to a naturally-occurring amino acid. For example, the acyl or alkyl group may be a C4 to C30 (e.g., C12 to C18) fatty acyl group or C4 to C30 (e.g., C12 to C18) alkyl. The acyl or alkyl group may be any of those discussed herein.

[0911] In some embodiments, the acyl or alkyl group is attached directly to the amino acid, e.g., via the side chain of the amino acid. In other embodiments, the acyl or alkyl group is attached to the amino acid via a spacer (e.g., an amino acid, a dipeptide, a tripeptide, a hydrophilic bifunctional spacer, a hydrophobic bifunctional spacer). In certain aspects, the spacer is 3 to 10 atoms in length. In some embodiments, the amino acid spacer is not γ-Glu. In some embodiments, the dipeptide spacer is not γ-Glu-γ-Glu.

[0912] Also, in exemplary embodiments, the amino acid to which the acyl or alkyl group is attached may be any of those described herein, including, for example, an amino acid of Formula I, II, or III. The amino acid which is acylated or alkylated may be a Lys, for example. Suitable amino acids comprising an acyl or alkyl group, as well as suitable acyl groups and alkyl groups, are described herein. See, for example, the teachings under the sections entitled Acylation and Alkylation.

[0913] In other embodiments, 1-6 amino acids (e.g., 1-2, 1-3, 1-4, 1-5 amino acids) of the extension are positive-charged amino acids, e.g., amino acids of Formula IV, such as, for example, Lys. As used herein, the term “positive-charged amino acid” refers to any amino acid, naturally-occurring or non-naturally occurring, comprising a positive charge on an atom of its side chain at a physiological pH. In certain aspects, the positive-charged amino acids are located at any of positions 37, 38, 39, 40, 41, 42, and 43. In specific embodiments, a positive-charged amino acid is located at position 40.

[0914] In other instances, the extension is acylated or alkylated as described herein and comprises 1-6 positive charged amino acids as described herein.

[0915] In yet other embodiments, the analogs which exhibit agonist activity at the GIP receptor comprises (i) SEQ ID NO: 1 with at least one amino acid modification, (ii) an extension of 1 to 21 amino acids (e.g., 5 to 18, 7 to 15, 9 to 12 amino acids) C-terminal to the amino acid at position 29 of the analog, and (iii) an amino acid comprising an acyl or alkyl group which is non-native to a naturally-occurring amino acid which is located outside of the C-terminal extension (e.g., at any of positions 1-29). In some embodiments, the analog comprises an acylated or alkylated amino acid at position 10. In particular aspects, the acyl or alkyl group is a C4 to C30 fatty acyl or C4 to C30 alkyl group. In some embodiments, the acyl or alkyl group is attached via a spacer, e.g., an amino acid, dipeptide, tripeptide, hydrophilic bifunctional spacer, hydrophobic bifunctional spacer). In certain aspects, the analog comprises an amino acid modification which stabilizes the alpha helix, such as a salt bridge between a Glu at position 16 and a Lys at position 20, or an alpha, alpha-disubstituted amino acid at any one, two, three, or more of positions 16, 20, 21, and 24. In specific aspects, the analog additionally comprises amino acid modifications which confer DPP-IV protease resistance, e.g., DMIA at position 1, AIB at position 2. Analogs comprising further amino acid modifications are contemplated herein.

[0916] In certain embodiments, the analogs having GIP receptor activity exhibit at least 0.1% (e.g., at least 0.5%, 1%, 2%, 5%, 10%, 15%, or 20%) activity of native GIP at the GIP receptor. In some embodiments, the analogs exhibit more than 20% (e.g., more than 50%, more than 75%, more than 100%, more than 200%, more than 300%, more than 500%) activity of native GIP at the GIP receptor. In some embodiments, the analog exhibits appreciable agonist activity at one or both of the GLP-1 and glucagon receptors. In some aspects, the selectivity for these receptors (GIP receptor and GLP-1 receptor and/or glucagon receptor) are within 1000-fold. For example, the selectivity for the GLP-1 receptor of the analogs having GIP receptor activity can be less than 500-fold, 100-fold, within 50-fold, within 25 fold, within 15 fold, within 10 fold) the selectivity for the GIP receptor and/or the glucagon receptor.

[0917] In particular aspects, the analog comprises the structures of any of SEQ ID NOs: 657-669.

[0918] In accordance with some embodiments, the Class 3 glucagon related peptide comprises the amino acid sequence of native glucagon (SEQ ID NO: 1) comprising the following modifications: AIB at position 2, Glu at position 3, Lys at position 10, Glu at position 16, Gln at position 17, Ala at position 18, Lys at position 20, Glu at position 21, Ile at position 23, Ala at position 24; wherein Lys at position 10 is acylated with a C14 or C16 fatty acid, and wherein the C-terminal carboxylate is replaced with an amide. In a specific embodiment, this Class 3 glucagon related peptide is attached via its N-terminal amino acid to the dipeptide D-Lys-Sarcosine.

[0919] In accordance with some embodiments, the Class 3 glucagon related peptide comprises, consists essentially of, or consists of an amino acid sequence of any of SEQ ID NOs: 70-514, 517-534, or 554, optionally with up to 1, 2, 3, 4, or 5 further modifications that retain GLP-1 agonist and/or glucagon agonist activity. In certain embodiments, the Class 3 glucagon related peptide comprises the amino acids of any of SEQ ID NOs: 562-684, and 1701-1776. In some embodiments, the Class 3 glucagon related peptide comprises the amino acid sequences of any of SEQ ID NOs: 1801-1921.

[0920] Class 4 Glucagon Related Peptides

[0921] In certain embodiments, a glucagon related peptide is a Class 4 glucagon related peptide (see, e.g., International (PCT) Patent Application No. PCT/US2008/080973, incorporated herein by reference in its entirety).

[0922] All biological sequences referenced in the following section (SEQ ID NOs: 1301-1371) correspond to SEQ ID NOs: 1-71 in International Patent Application No. PCT/US2008/080973.

[0923] Activity

[0924] In accordance with some embodiments, Class 4 glucagon related peptides are provided (hereafter referred to as “Class 4 peptides”). In certain aspects a Class 4 peptide is provided which has glucagon antagonist activity. A glucagon antagonists would be used in any setting where the suppression of glucagon agonism is desired. The most immediate and obvious use would be in the treatment of diabetes where glucagon antagonism has been demonstrated in pre-clinical models of hyperglycemia to yield a lowering of blood glucose. Glucagon antagonists can be further modified to improve the biophysical stability and/or aqueous solubility of the compounds while maintaining the antagonist activity of the parent compound. In certain aspects a Class 4 peptide is defined as a pure glucagon antagonist.

[0925] The term “glucagon antagonist” refers to a compound that counteracts glucagon activity or prevents glucagon function. For example, a glucagon antagonist exhibits at least 60% inhibition (e.g., at least 70% inhibition) and preferably, at least 80% inhibition, of the maximum response achieved by glucagon at the glucagon receptor. In some embodiments, the glucagon antagonist exhibits at least 90% inhibition of the maximum response achieved by glucagon at the glucagon receptor. In a specific embodiment, the glucagon antagonist exhibits 100% inhibition of the maximum response achieved by glucagon at the glucagon receptor. Additionally, a glucagon antagonist at a concentration of about 1 μM exhibits less than about 20% of the maximum agonist activity achieved by glucagon at the glucagon receptor. In some embodiments, the glucagon antagonist exhibits less than about 10% of the maximum agonist activity achieved by glucagon at the glucagon receptor. In a specific embodiment, the glucagon antagonist exhibits less than about 5% of the maximum agonist activity achieved by glucagon at the glucagon receptor. In yet another specific embodiment, the glucagon antagonist exhibits 0% of the maximum agonist activity achieved by glucagon at the glucagon receptor.

[0926] A “pure glucagon antagonist” is a glucagon antagonist that does not produce any detected stimulation of glucagon or GLP-1 receptor activity, as measured by cAMP production using a validated in vitro model assay (see, e.g., PCT/US2008/080973). For example, a pure glucagon antagonist exhibits less than about 5% (e.g., less than about 4%, less than about 3%, less than about 2%, less than about 1%, about 0%) of the maximum agonist activity achieved by glucagon at the glucagon receptor and exhibits less than about 5% (e.g., less than about 4%, less than about 3%, less than about 2%, less than about 1%, and about 0%) of the maximum agonist activity achieved by GLP-1 at the GLP-1 receptor.

[0927] Accordingly, in some aspects, there is provided Class 4 peptides that exhibit pure glucagon antagonist activity. In accordance with some embodiments the glucagon antagonist exhibits activity that reduces glucagon receptor glucagon-induced cAMP production by a maximum of at least 50% when the glucagon receptor is contacted simultaneously with 0.8 nM of glucagon and the glucagon antagonist, as measured by cAMP production in an in vitro assay. In some embodiments, the glucagon antagonist reduces glucagon receptor glucagon-induced cAMP production by a maximum amount of at least 80%.

[0928] Class 4 peptides are believed to be suitable for any use that has previously been described for glucagon antagonists. Accordingly, the Class 4 peptides described herein can be used to treat hyperglycemia, or treat other metabolic diseases that result from high blood levels of glucagon or high blood glucose levels. In accordance with some embodiments the patient to be treated using the Class 4 peptides disclosed herein is a domesticated animal, and in another embodiment the patient to be treated is a human. Studies suggest that lack of glucagon suppression in diabetic patients contributes to postprandial hyperglycemia in part via accelerated glycogenolysis. Analysis of blood glucose during an Oral Glucose Tolerance Test (OGTT), and in the presence or absence of somatostatin-induced glucagon suppression, has shown a significant increase in glucose in subjects with higher glucagon levels. Accordingly, the Class 4 peptides of the present invention can be used to treat hyperglycemia, and are expected to be useful for treating a variety of types of diabetes including diabetes mellitus type I, diabetes mellitus type II, or gestational diabetes, either insulin-dependent or non-insulin-dependent, and reducing complications of diabetes including nephropathy, retinopathy and vascular disease.

[0929] In some embodiments the terminal ten amino acids of Exendin-4 (i.e. the sequence of SEQ ID NO: 1319 (GPSSGAPPPS)) are linked to the carboxy terminus of a Class 4 peptide. These fusion proteins are anticipated to have pharmacological activity for suppressing appetite and inducing weight loss/weight maintenance. In accordance with some embodiments the Class 4 peptides disclosed herein can be further modified to include the amino acid sequence of SEQ ID NO: 1319 (GPSSGAPPPS) linked to amino acid 24 of the Class 4 peptide of SEQ ID NO: 1342 and administered to individuals to induce weight loss or assist in weight maintenance. More particularly, the Class 4 peptide comprises a sequence selected from the group consisting of SEQ ID NO: 1302, SEQ ID NO: 1303, SEQ ID NO: 1304 SEQ ID NO: 1305, SEQ ID NO: 1306, SEQ ID NO: 1307, SEQ ID NO: 1308, SEQ ID NO: 1336, SEQ ID NO: 1339, SEQ ID NO: 1340 SEQ ID NO: 1341, SEQ ID NO: 1342, SEQ ID NO: 1343 and SEQ ID NO: 1344 and further comprising the amino acid sequence of SEQ ID NO: 1319 (GPSSGAPPPS) linked to amino acid 24 of the Class 4 peptide is used to suppress appetite and inducing weight loss/weight maintenance. In some embodiments the administered Class 4 peptide comprises the sequence of SEQ ID NO: 1346 or SEQ ID NO: 1347.

[0930] Such methods for reducing appetite or promoting loss of body weight are expected to be useful in reducing body weight, preventing weight gain, or treating obesity of various causes, including drug-induced obesity, and reducing complications associated with obesity including vascular disease (coronary artery disease, stroke, peripheral vascular disease, ischemia reperfusion, etc.), hypertension, onset of diabetes type II, hyperlipidemia and musculoskeletal diseases.

[0931] The Class 4 peptides of the invention may be administered alone or in combination with other anti-diabetic or anti-obesity agents. Anti-diabetic agents known in the art or under investigation include insulin, sulfonylureas, such as tolbutamide (Orinase), acetohexamide (Dymelor), tolazamide (Tolinase), chlorpropamide (Diabinese), glipizide (Glucotrol), glyburide (Diabeta, Micronase, Glynase), glimepiride (Amaryl), or gliclazide (Diamicron); meglitinides, such as repaglinide (Prandin) or nateglinide (Starlix); biguanides such as metformin (Glucophage) or phenformin; thiazolidinediones such as rosiglitazone (Avandia), pioglitazone (Actos), or troglitazone (Rezulin), or other PPARγ inhibitors; alpha glucosidase inhibitors that inhibit carbohydrate digestion, such as miglitol (Glyset), acarbose (Precose/Glucobay); exenatide (Byetta) or pramlintide; Dipeptidyl peptidase-4 (DPP-4) inhibitors such as vildagliptin or sitagliptin; SGLT (sodium-dependent glucose transporter 1) inhibitors; or FBPase (fructose 1,6-bisphosphatase) inhibitors.

[0932] Anti-obesity agents known in the art or under investigation include appetite suppressants, including phenethylamine type stimulants, phentermine (optionally with fenfluramine or dexfenfluramine), diethylpropion (Tenuate®), phendimetrazine (Prelu-2®, Bontril®), benzphetamine (Didrex®), sibutramine (Meridia®, Reductil®); rimonabant (Acomplia®), other cannabinoid receptor antagonists; oxyntomodulin; fluoxetine hydrochloride (Prozac); Qnexa (topiramate and phentermine), Excalia (bupropion and zonisamide) or Contrave (bupropion and naltrexone); or lipase inhibitors, similar to xenical (Orlistat) or Cetilistat (also known as ATL-962), or GT 389-255.

[0933] The Class 4 peptides of the present invention can also be administered to patients suffering from catabolic wasting. It is estimated that over half of cancer patients experience catabolic wasting which is characterized by unintended and progressive weight loss, weakness, and low body fat and muscle. The syndrome is equally common in AIDS patients and can also be present in bacterial and parasitic diseases, rheumatoid arthritis, and chronic diseases of the bowel, liver, lungs, and heart. It is usually associated with anorexia and can manifest as a condition in aging or as a result of physical trauma. Catabolic wasting is a symptom that diminishes the quality of life, worsens the underlying condition, and is a major cause of death. Applicants anticipate that the Class 4 peptides disclosed herein can be administered to patients to treat catabolic wasting.

[0934] Pharmaceutical compositions comprising the Class 4 peptides disclosed herein can be formulated and administered to patients to using standard pharmaceutically acceptable carriers and routes of administration known to those skilled in the art. Accordingly the present disclosure also encompasses pharmaceutical compositions comprising one or more of the Class 4 peptides disclosed herein in combination with a pharmaceutically acceptable carrier. The pharmaceutical compositions may comprise the Class 4 peptides as the sole pharmaceutically active component, or the Class 4 peptides can be combined with one or more additional active agents. In accordance with some embodiments a composition is provided comprising a Class 4 peptide of the present invention and a compound that activates the GLP-1 receptor (such as GLP-1, a GLP-1 analog, an exendin-4 analog, or derivatives thereof). In accordance with some embodiments a composition is provided comprising a Class 4 peptide of the present invention and insulin or an insulin analog. Alternatively, a composition provided for inducing weight loss or preventing weight gain can be provided that comprises the sequence of SEQ ID NO: 1342 further comprising the amino acid sequence of SEQ ID NO: 1319 (GPSSGAPPPS) linked to amino acid 24 of SEQ ID NO: 1342, and an anti-obesity peptide. Suitable anti-obesity peptides include those disclosed in U.S. Pat. Nos. 5,691,309, 6,436,435 or US Patent application 20050176643, and including, but not limited to GLP-1, GIP (Gastric Inhibitory Polypeptide), MP1, PYY, MC-4, Leptin.

[0935] Class 4 Peptide Structure

[0936] In some embodiments Class 4 glucagon related peptides are provided wherein the normally occurring aspartic acid at position nine (of glucagon, SEQ ID NO: 1301) has been substituted with glutamic acid or a cysteic acid-based derivative. More particularly, deletion of the first amino acid (des-His) and substitution of the aspartic acid at position 9 with glutamic acid, in some aspects, produces a Class 4 peptide. Class 4 glucagon related peptides having sulfonic acid substituents substituted at amino acid position nine of glucagon perform similarly to the carboxylic acid-based amino acids but with a few critical differences in relation to physical properties such as solubility. Homocysteic acid (hCysSO₃) when substituted for the isosteric glutamic acid at position nine in the conventional des-His, Glu9 Class 4 peptide retains a partial antagonist and weak agonist.

[0937] In some embodiments there is provided a Class 4 peptide wherein the first two to five amino acids are removed, and position 9 (according to the numbering of SEQ ID NO: 1301) is replaced with hCys(SO₃), homoglutamic acid, β-homoglutamic acid, or an alkylcarboxylate derivative of cysteine having the structure of:

[chemical structure]

wherein X₅ is C₁-C₄ alkyl, C₂-C₄ alkenyl, or C₂-C₄ alkynyl, provides a compound that performs as a hormonal antagonist that is highly specific, potent and without contaminating agonist properties.

[0938] In accordance with some embodiments a Class 4 peptide is provided that comprises a glucagon peptide modified, relative to the wild type sequence of SEQ ID NO: 1301, by the deletion of two to five amino acid residues from the N-terminus and substitution of the aspartic acid residue at position nine of the native protein with a glutamic acid, homoglutamic acid, β-homoglutamic acid, a sulfonic acid derivative of cysteine, or an alkylcarboxylate derivative of cysteine having the structure of:

[chemical structure]

[0939] wherein X₅ is C₁-C₄ alkyl, C₂-C₄ alkenyl, or C₂-C₄ alkynyl.

[0940] In one specific embodiment, the Class 4 peptide comprising the deletion of two to five amino acid residues from the N-terminus and substitution of the Asp at position 9 of the native glucagon, is further modified by up to three amino acid modifications. For example, the Class 4 peptide may comprise one, two, or three conservative amino acid modifications. Alternatively or additionally, the Class 4 peptide may comprise one or more amino acid modifications selected from the group consisting of:
[0941] A. substitution of one or two amino acids at positions 10, 20, and 24, (according to the amino acid numbering of SEQ ID NO: 1301), or the N- or C-terminal amino acid of the Class 4 peptide with an amino acid covalently attached to an acyl group or alkyl group via an ester, ether, thioether, amide, or alkyl amine linkage;
[0942] B. substitution of one or two amino acids at positions 16, 17, 20, 21, and 24 (according to the amino acid numbering of SEQ ID NO: 1301), or the N- or C-terminal amino acid of the Class 4 peptide with an amino acid selected from the group consisting of: Cys, Lys, ornithine, homocysteine, and acetyl-phenylalanine (Ac-Phe), wherein the amino acid of the group is covalently bonded to a hydrophilic moiety;
[0943] C. addition of an amino acid covalently bonded to a hydrophilic moiety to the N- or C-terminus of the Class 4 peptide;
[0944] D. substitution of Asp at position 15 (according to the numbering of SEQ ID NO: 1301) with cysteic acid, glutamic acid, homoglutamic acid, and homocysteic acid;
[0945] E. substitution of Ser at position 16 (according to the numbering of SEQ ID NO: 1301) with cysteic acid, glutamic acid, homoglutamic acid, and homocysteic acid;
[0946] F. substitution with AIB at one or more of positions 16, 20, 21, and 24 according to the amino acid numbering of SEQ ID NO: 1301;
[0947] G. deletion of the amino acid at position 29 or the amino acids at positions 28 and 29, according to the numbering of SEQ ID NO: 1301;
[0948] H. substitution of each or both of the Asn at position 28 and the Thr at position 29 (according to the amino acid numbering of SEQ ID NO: 1301) with charged amino acids; and/or addition of one to two charged amino acids at the C-terminus of SEQ ID NO: 1301;
[0949] I. substitution of the Met at position 27 (according to the numbering of SEQ ID NO: 1301) with Leu or norleucine;
[0950] J. addition of a peptide having the amino acid sequence of any of SEQ ID NOs: 19-21 and 53 to the C-terminus of SEQ ID NO: 1301; wherein Thr at position 29 (according to the numbering of SEQ ID NO: 1301) is Thr or Gly; and
[0951] K. replacement of the C-terminal carboxylate with an amide or ester.

[0952] In a specific embodiment, the Class 4 peptide comprises an amino acid modification of A, B, or C, as described above, or a combination thereof. In yet another specific embodiment, the Class 4 peptide further comprises an amino acid modification of any of D to K as described above, or a combination thereof, in addition to the amino acid modification(s) of A, B, and/or C.

[0953] In some embodiments the Class 4 peptide comprises a glucagon peptide, wherein the first 5 amino acids have been removed from the N-terminus, and the remaining N-terminal amino group has been replaced with a hydroxyl group (the “PLA6 analog”), producing the peptide of SEQ ID NO: 1339. Applicants have found that substitution of phenyl-lactic acid for phenylalanine in Class 4 peptide analogs that have the first five amino acids deleted and substitution of a glutamic acid at position 9 (relative to native glucagon) further enhances the potency of those Class 4 peptide analogs.

[0954] In some embodiments the Class 4 peptide of SEQ ID NO: 1339 is further modified by substituting the aspartic acid residue at position four (position 9 of the native glucagon) with an amino acid of the general structure:

[chemical structure]

wherein X₆ is C₁-C₃ alkyl, C₂-C₃ alkene or C₂-C₃ alkynyl, and in some embodiments X₆ is C₁-C₃ alkyl, and in another embodiment X₆ is C₂ alkyl. In some embodiments the Class 4 peptide comprises a glucagon peptide, wherein the first 5 amino acids have been removed from the N-terminus, and the aspartic acid residue at position four (position 9 of the native glucagon) has been substituted with cysteic acid or homocysteic acid. In some embodiments the Class 4 peptide comprises a glucagon peptide comprising an amino acid sequence selected from the group consisting of SEQ ID NO: 1339, SEQ ID NO: 1307 and SEQ ID NO: 1308. In some embodiments the Class 4 peptide comprises an amino acid sequence selected from the group consisting of SEQ ID NO: 1308, wherein the amino acid at position four is homocysteic acid.

[0955] In another embodiment, the Class 4 peptide of SEQ ID NO: 1339 is further modified by substituting the aspartic acid residue at position four (position 9 of the native glucagon) with glutamic acid, homoglutamic acid, β-homoglutamic acid, or an alkylcarboxylate derivative of cysteine having the structure of:

[chemical structure]

[0956] wherein X₅ is C₁-C₄ alkyl, C₂-C₄ alkenyl, or C₂-C₄ alkynyl. In a specific embodiment, X₅ is C₁ or C₂ alkyl.

[0957] However, applicants have discovered that with the substitution of the N-terminal phenylalanine with PLA in a des1-5 glucagon analog (i.e., a glucagon analog having the first five amino acids deleted), further substitution of the native aspartic acid residue at position four (position 9 of the native glucagon) is not required to produce an analog that exhibits pure antagonism. This result is surprising in light of the prior art teachings that the native aspartic acid residue at position four must substituted to produce high affinity and potent antagonists of glucagon (2-29) analogs. The use of the PLA substitution improves the relative potency of the Asp9 analog to a point comparable to that of the Glu9 and hCys(SO₃H)9 analogs.

[0958] Substitution of the phenylalanine residue with other phenylalanine analogs, including 3, 4-2F-phenylalnine (3, 4-2F-Phe), 2-naphthyalanine (2-NaI), N-acyl-phenylalanine (Ac-Phe), alpha-methylhydrocinnamic acid (MCA) and benzylmalonic acid (BMA) did not perform as potently as the PLA substitution.

[0959] Substituting PLA at sites other than at position six (according to the amino acid numbering of native glucagon), including at positions 4 and 5 reveals that the PLA6 analog is an appreciably more potent antagonist than glucagon analogs having a slightly extended N-terminus. The present invention also includes analogs wherein the N-terminal amino group is substituted with an acylated and alkylated “O-terminal” peptides.

[0960] Furthermore, the PLA6 substitution not only increases the potency of the antagonist but also serves a critical role in pegylation. The PLA6 analogs can be selectively pegylated without restoration of glucagon agonism. In the absence of the PLA substitution, pegylation of the analog surprisingly induces glucagon agonism. This glucagon agonism is not seen in the pegylated PLA6 analogs. Several sites for pegylation were investigated including positions 3, 6 and 19 (positions 8, 11 and 19 of native glucagon) and at the N-terminal amino acid residue. In some embodiments the pegylation is at position 19 (position 24 of native glucagon) as that site exhibits the most potent and selective glucagon antagonism.

[0961] In some embodiments, the Class 4 peptide comprises the general structure of A-B-C, wherein A is selected from the group consisting of:
[0962] (i) phenyl lactic acid (PLA);
[0963] (ii) an oxy derivative of PLA;
[0964] (iii) a peptide of 2 to 6 amino acids in which two consecutive amino acids of the peptide are linked via an ester or ether bond;

[0965] B represents amino acids i to 26 of SEQ ID NO: 1301, wherein i is 3, 4, 5, 6, or 7, optionally comprising one or more amino acid modifications selected from the group consisting of:
[0966] (iv) Asp at position 9 (according to the amino acid numbering of SEQ ID NO: 1301) is substituted with a Glu, a sulfonic acid derivative of Cys, homoglutamic acid, β-homoglutamic acid, or an alkylcarboxylate derivative of cysteine having the structure of:

[chemical structure]

wherein X₅ is C₁-C₄ alkyl, C₂-C₄ alkenyl, or C₂-C₄ alkynyl.
[0967] (v) substitution of one or two amino acids at positions 10, 20, and 24, (according to the amino acid numbering of SEQ ID NO: 1301) with an amino acid covalently attached to an acyl or alkyl group via an ester, ether, thioether, amide, or alkyl amine linkage;
[0968] (vi) substitution of one or two amino acids at positions 16, 17, 20, 21, and 24 (according to the amino acid numbering of SEQ ID NO: 1301) with an amino acid selected from the group consisting of: Cys, Lys, ornithine, homocysteine, and acetyl-phenylalanine (Ac-Phe), wherein the amino acid of the group is covalently attached to a hydrophilic moiety;
[0969] (vii) Asp at position 15 (according to the numbering of SEQ ID NO: 1301) is substituted with cysteic acid, glutamic acid, homoglutamic acid, and homocysteic acid;
[0970] (viii) Ser at position 16 (according to the numbering of SEQ ID NO: 1301) is substituted with cysteic acid, glutamic acid, homoglutamic acid, and homocysteic acid;
[0971] (ix) substitution with AIB at one or more of positions 16, 20, 21, and 24 according to the amino acid numbering of SEQ ID NO: 1301;
   and C is selected from the group consisting of:
[0972] (x) X;
[0973] (xi) X—Y;
[0974] (xii) X—Y—Z; and
[0975] (xiii) X—Y—Z—R10,
   wherein X is Met, Leu, or Nle; Y is Asn or a charged amino acid; Z is Thr, Gly, Cys, Lys, ornithine (Orn), homocysteine, acetyl phenylalanine (Ac-Phe), or a charged amino acid; wherein R10 is selected from a group consisting of SEQ ID NOs: 1319-1321 and 1353; and
[0976] (xiv) any of (x) to (xiii) in which the C-terminal carboxylate is replaced with an amide.

[0977] In a specific aspect, the Class 4 peptide comprises an oxy derivative of PLA. As used herein “oxy derivative of PLA” refers to a compound comprising a modified structure of PLA in which the hydroxyl group has been replaced with O—R₁₁, wherein R₁₁ is a chemical moiety. In this regard, the oxy derivative of PLA can be, for example, an ester of PLA or an ether of PLA.

[0978] Methods of making oxy derivatives of PLA are known in the art. For example, when the oxy derivative is an ester of PLA, the ester may be formed by upon reaction of the hydroxyl of PLA with a carbonyl bearing a nucleophile. The nucleophile can be any suitable nucleophile, including, but not limited to an amine or hydroxyl. Accordingly, the ester of PLA can comprise the structure of Formula IV:

[chemical structure]

[0979] wherein R7 is an ester formed upon reaction of the hydroxyl of PLA with a carbonyl bearing a nucleophile.

[0980] The carbonyl bearing a nucleophile (which reacts with the hydroxyl of PLA to form an ester) can be, for example, a carboxylic acid, a carboxylic acid derivative, or an activated ester of a carboxylic acid. The carboxylic acid derivative can be, but is not limited to, an acyl chloride, an acid anhydride, an amide, an ester, or a nitrile. The activated ester of a carboxylic acid can be, for example, N-hydroxysuccinimide (NHS), tosylate (Tos), a carbodiimide, or a hexafluorophosphate. In some embodiments, the carbodiimide is 1,3-dicyclohexylcarbodiimide (DCC), 1,1′-carbonyldiimidazole (CDI), 1-ethyl-3-(3-dimethylaminopropyl)carbodiimide hydrochloride (EDC), or 1,3-diisopropylcarbodiimide (DICD). In some embodiments, the hexafluorophosphate is selected from a group consisting of hexafluorophosphate benzotriazol-1-yl-oxy-tris(dimethylamino)phosphonium hexafluorophosphate (BOP), benzotriazol-1-yl-oxytripyrrolidinophosphonium hexafluorophosphate (PyBOP), 2-(1H-7-azabenzotriazol-1-yl)-1,1,3,3-tetramethyl uronium hexafluorophosphate (HATU), and o-benzotriazole-N,N,N′,N′-tetramethyl-uronium-hexafluoro-phosphate (HBTU).

[0981] Methods of making ethers from reaction with a hydroxyl group (e.g., the hydroxyl of PLA) also are known in the art. For example, the hydroxyl group of PLA may be reacted with a halogenated alkyl or tosylated alkyl alcohol to form an ether bond.

[0982] Generally, the chemical moiety of R₁₁ is one which does not decrease the activity of the Class 4 peptide. In some embodiments, the chemical moiety enhances the activity, stability, and/or solubility of the Class 4 peptide.

[0983] In a specific embodiment, the chemical moiety bound to PLA via an oxygen-containing bond (e.g., via an ester or ether bond) is a polymer (e.g., a polyalkylene glycol), a carbohydrate, an amino acid, a peptide, or a lipid, e.g., a fatty acid or a steroid.

[0984] In a specific embodiment, the chemical moiety is an amino acid, which, optionally, is a part of a peptide, such that Formula IV is a depsipeptide. In this regard, PLA may be at a position other than the N-terminal amino acid residue of the Class 4 peptide, such that the Class 4 peptide comprises one or more (e.g., 1, 2, 3, 4, 5, 6, or more) amino acids N-terminal to the PLA residue. For example, the Class 4 peptide can comprise PLA at position n, wherein n is 2, 3, 4, 5, or 6 of the Class 4 peptide.

[0985] The amino acids N-terminal to the PLA residue may be synthetic or naturally-occurring. In a specific embodiment, the amino acids which are N-terminal PLA are naturally-occurring amino acids. In some embodiments, the amino acids which are N-terminal to PLA are the N-terminal amino acids of native glucagon. For example, the Class 4 peptide can comprise at the N-terminus the amino acid sequence of any of SEQ ID NOs: 1354-1358, wherein PLA is linked to threonine via an ester bond:

| | |
|---|---|
| His-Ser-Gln-Gly-Thr-PLA | SEQ ID NO: 1354 |
| Ser-Gln-Gly-Thr-PLA | SEQ ID NO: 1355 |
| Gln-Gly-Thr-PLA | SEQ ID NO: 1356 |
| Gly-Thr-PLA | SEQ ID NO: 1357 |
| Thr-PLA | SEQ ID NO: 1358 |

[0986] In an alternative embodiment, one or more of the N-terminal amino acids may be substituted with an amino acid other than the amino acid of native glucagon. For example, when the Class 4 peptide comprises PLA as the amino acid at position 5 or 6, the amino acid at position 1 and/or position 2 may be an amino acid which reduces susceptibility to cleavage by dipeptidyl peptidase IV. More particularly, in some embodiments, position 1 of the Class 4 peptide is an amino acid selected from the group consisting of D-histidine, alpha, alpha-dimethyl imidiazole acetic acid (DMIA), N-methyl histidine, alpha-methyl histidine, imidazole acetic acid, desaminohistidine, hydroxyl-histidine, acetyl-histidine and homo-histidine. More particularly, in some embodiments, position 2 of the antagonist peptide is an amino acid selected from the group consisting of D-serine, D-alanine, valine, glycine, N-methyl serine, N-methyl alanine, and aminoisobutyric acid (AIB). Also, for example, when the Class 4 peptide comprises PLA as the amino acid at position 4, 5, or 6, the amino acid at position 3 of the Class 4 peptide may be glutamic acid, as opposed to the native glutamine residue of native glucagon. In an exemplary embodiment of the invention, the Class 4 peptide comprises at the N-terminus the amino acid sequence of any of SEQ ID NOs: 1359-1361.

[0987] With respect to the Class 4 peptides comprising a compound of Formula IV, the polymer may be any polymer, provided that it can react with the hydroxyl group of PLA. The polymer may be one that naturally or normally comprises a carbonyl bearing a nucleophile. Alternatively, the polymer may be one which was derivatized to comprise the carbonyl bearing the carbonyl. The polymer may be a derivatized polymer of any of: polyamides, polycarbonates, polyalkylenes and derivatives thereof including, polyalkylene glycols, polyalkylene oxides, polyalkylene terepthalates, polymers of acrylic and methacrylic esters, including poly(methyl methacrylate), poly(ethyl methacrylate), poly(butylmethacrylate), poly(isobutyl methacrylate), poly(hexylmethacrylate), poly(isodecyl methacrylate), poly(lauryl methacrylate), poly(phenyl methacrylate), poly(methyl acrylate), poly(isopropyl acrylate), poly(isobutyl acrylate), and poly(octadecyl acrylate), polyvinyl polymers including polyvinyl alcohols, polyvinyl ethers, polyvinyl esters, polyvinyl halides, poly(vinyl acetate), and polyvinylpyrrolidone, polyglycolides, polysiloxanes, polyurethanes and co-polymers thereof, celluloses including alkyl cellulose, hydroxyalkyl celluloses, cellulose ethers, cellulose esters, nitro celluloses, methyl cellulose, ethyl cellulose, hydroxypropyl cellulose, hydroxy-propyl methyl cellulose, hydroxybutyl methyl cellulose, cellulose acetate, cellulose propionate, cellulose acetate butyrate, cellulose acetate phthalate, carboxylethyl cellulose, cellulose triacetate, and cellulose sulphate sodium salt, polypropylene, polyethylenes including poly(ethylene glycol), poly(ethylene oxide), and poly(ethylene terephthalate), and polystyrene.

[0988] The polymer can be a biodegradable polymer, including a synthetic biodegradable polymer (e.g., polymers of lactic acid and glycolic acid, polyanhydrides, poly(ortho)esters, polyurethanes, poly(butic acid), poly(valeric acid), and poly(lactide-cocaprolactone)), and a natural biodegradable polymer (e.g., alginate and other polysaccharides including dextran and cellulose, collagen, chemical derivatives thereof (substitutions, additions of chemical groups, for example, alkyl, alkylene, hydroxylations, oxidations, and other modifications routinely made by those skilled in the art), albumin and other hydrophilic proteins (e.g., zein and other prolamines and hydrophobic proteins)), as well as any copolymer or mixture thereof. In general, these materials degrade either by enzymatic hydrolysis or exposure to water in vivo, by surface or bulk erosion.

[0989] The polymer can be a bioadhesive polymer, such as a bioerodible hydrogel described by H. S. Sawhney, C. P. Pathak and J. A. Hubbell in Macromolecules, 1993, 26, 581-587, the teachings of which are incorporated herein, polyhyaluronic acids, casein, gelatin, glutin, polyanhydrides, polyacrylic acid, alginate, chitosan, poly(methyl methacrylates), poly(ethyl methacrylates), poly(butylmethacrylate), poly(isobutyl methacrylate), poly(hexylmethacrylate), poly(isodecyl methacrylate), poly(lauryl methacrylate), poly(phenyl methacrylate), poly(methyl acrylate), poly(isopropyl acrylate), poly(isobutyl acrylate), and poly(octadecyl acrylate).

[0990] In some embodiments, the polymer is a water-soluble polymer. Suitable water-soluble polymers are known in the art and include, for example, polyvinylpyrrolidone, hydroxypropyl cellulose (HPC; Klucel), hydroxypropyl methylcellulose (HPMC; Methocel), nitrocellulose, hydroxypropyl ethylcellulose, hydroxypropyl butylcellulose, hydroxypropyl pentylcellulose, methyl cellulose, ethylcellulose (Ethocel), hydroxyethyl cellulose, various alkyl celluloses and hydroxyalkyl celluloses, various cellulose ethers, cellulose acetate, carboxymethyl cellulose, sodium carboxymethyl cellulose, calcium carboxymethyl cellulose, vinyl acetate/crotonic acid copolymers, poly-hydroxyalkyl methacrylate, hydroxymethyl methacrylate, methacrylic acid copolymers, polymethacrylic acid, polymethylmethacrylate, maleic anhydride/methyl vinyl ether copolymers, poly vinyl alcohol, sodium and calcium polyacrylic acid, polyacrylic acid, acidic carboxy polymers, carboxypolymethylene, carboxyvinyl polymers, polyoxyethylene polyoxypropylene copolymer, polymethylvinylether co-maleic anhydride, carboxymethylamide, potassium methacrylate divinylbenzene co-polymer, polyoxyethyleneglycols, polyethylene oxide, and derivatives, salts, and combinations thereof.

[0991] In a specific embodiment, the polymer is a polyalkylene glycol, including, for example, polyethylene glycol (PEG).

[0992] The carbohydrate may be any carbohydrate provided that it comprises or is made to comprise a carbonyl with an alpha leaving group. The carbohydrate, for example, may be one which has been derivatized to comprise a carbonyl with an alpha leaving group. In this regard, the carbohydrate may be a derivatized form of a monosaccharide (e.g., glucose, galactose, fructose), a disaccharide (e.g., sucrose, lactose, maltose), an oligosaccharide (e.g., raffinose, stachyose), a polysaccharide (a starch, amylase, amylopectin, cellulose, chitin, callose, laminarin, xylan, mannan, fucoidan, galactomannan.

[0993] With respect to the Class 4 peptides comprising a compound of Formula IV, the lipid may be any lipid comprising a carbonyl with an alpha leaving group. The lipid, for example, may be one which is derivatized to comprise the carbonyl. In this regard, the lipid, may be a derivative of a fatty acid (e.g., a C4-C30 fatty acid, eicosanoid, prostaglandin, leukotriene, thromboxane, N-acyl ethanolamine), glycerolipid (e.g., mono-, di-, tri-substituted glycerols), glycerophospholipid (e.g., phosphatidylcholine, phosphatidylinositol, phosphatidylethanolamine, phosphatidylserine), sphingolipid (e.g., sphingosine, ceramide), sterol lipid (e.g., steroid, cholesterol), prenol lipid, saccharolipid, or a polyketide. oil, wax, cholesterol, sterol, fat-soluble vitamin, monoglyceride, diglyceride, triglyceride, a phospholipid.

[0994] In some embodiments, R7 has a molecular weight of about 100 kDa or less, e.g., about 90 kDa or less, about 80 kDa or less, about 70 kDa or less, about 60 kDa or less, about 50 kDa or less, about 40 kDa or less. Accordingly, R7 can have a molecular weight of about 35 kDa or less, about 30 kDa or less, about 25 kDa or less, about 20 kDa or less, about 15 kDa or less, about 10 kDa or less, about 5 kDa or less, or about 1 kDa.

[0995] In an alternative embodiment, the Class 4 peptide comprises as A, a peptide of 2 to 6 amino acids in which two consecutive amino acids of the peptide are linked via an ester or ether bond. The ester or ether bond may be, e.g., between amino acids 2 and 3, 3 and 4, 4 and 5, or 5 and 6. Optionally the peptide may be further modified by covalent linkage to another chemical moiety including linkage to a polymer (e.g. a hydrophilic polymer), alkylation, or acylation.

[0996] With regard to the Class 4 peptide comprising the general structure A-B-C, B represents amino acids of native glucagon, e.g., i to 26 of SEQ ID NO: 1301, wherein i is 3, 4, 5, 6, or 7, optionally comprising one or more amino acid modifications. In a specific embodiment, B represents amino acids 7 to 26 of SEQ ID NO: 1301, optionally further modified.

[0997] In some embodiments, B is modified by up to three amino acid modifications. For example, B, which represents native amino acid sequence of SEQ ID NO: 1301 is modified by one or more conservative amino acid modifications.

[0998] In another embodiment, B comprises one or more amino acid modifications selected from the group consisting of (iv) to (ix), as described herein. In a specific embodiment, B comprises one or both of the amino acid modifications (v) and (vi). In a further specific embodiment, B comprises one or a combination of amino acid modifications selected from the group consisting of (iv), (vii), (viii), and (ix), in addition to (v) and (vi).

[0999] In another specific embodiment, the Class 4 peptide comprises one or more charged amino acids at the C-terminus. For example, Y and/or Z can be a charged amino acid, e.g., Lys, Arg, His, Asp, and Glu. In yet another embodiment, the Class 4 peptide comprises one to two charged amino acids (e.g., Lys, Arg, His, Asp, and Glu) C-terminal to Z. In a specific aspect, Z followed by one to two charged amino acids does not comprise R10.

[1000] The Class 4 peptide in some embodiments comprises a hydrophilic moiety covalently bound to an amino acid residue of the Class 4 peptide, as described herein. For example, the Class 4 peptide can comprise a hydrophilic moiety covalently attached to an amino acid at position 1, 16, 20, 21, or 24 according to the numbering of SEQ ID NO: 1301. In another embodiment, the hydrophilic moiety is attached to the C-terminal amino acid of the Class 4 peptide, which in some cases, is 1 or 11 amino acids C-terminal to Z. In yet another embodiment, the hydrophilic moiety is attached to PLA, when A is PLA, PLA-Phe, or PLA-Thr-Phe, wherein PLA is modified to comprise the hydrophilic moiety. In another embodiment, an amino acid comprising a hydrophilic moiety is added to the N- or C-terminus of the Class 4 peptide. In another embodiment, the Class 4 peptide comprises an acyl group or alkyl group as described herein. For example, the acylation or alkylation can occur off the side chain of the amino acid at position 10, 20, or 24, according to the numbering of SEQ ID NO: 1301. In an alternative embodiment, the acylation or alkylation occurs off the side chain of the C-terminal amino acid of the Class 4 peptide, which in some cases, is 1 or 11 amino acids C-terminal to Z. In yet another embodiment, when A is PLA, PLA-Phe, or PLA-Thr-Phe, the PLA is modified to comprise an acyl or alkyl group.

[1001] Exemplary Embodiments

[1002] The Class 4 peptide may comprise any amino acids, synthetic or naturally occurring, provided that at least two consecutive amino acids of the peptide are linked via an ester or ether bond. In a specific embodiment, the peptide comprises amino acids of native glucagon. For example, the peptide can comprise j to 6 of native glucagon (SEQ ID NO: 1301), wherein j is 1, 2, 3, 4, or 5. Alternatively, the peptide can comprise an amino acid sequence based on the N-terminus of SEQ ID NO: 1301 with one or more amino acid modifications. The amino acid at position 1 and/or position 2 may be an amino acid which reduces susceptibility to cleavage by dipeptidyl peptidase IV. For instance, the peptide can comprise at position 1 of the Class 4 peptide an amino acid selected from the group consisting of D-histidine, alpha, alpha-dimethyl imidiazole acetic acid (DMIA), N-methyl histidine, alpha-methyl histidine, imidazole acetic acid, desaminohistidine, hydroxyl-histidine, acetyl-histidine and homo-histidine. More particularly, in some embodiments, position 2 of the antagonist peptide is an amino acid selected from the group consisting of D-serine, D-alanine, valine, glycine, N-methyl serine, N-methyl alanine, and aminoisobutyric acid (AIB). Also, for example, the amino acid at position 3 of the Class 4 peptide may be glutamic acid, as opposed to the native glutamine residue of native glucagon. Accordingly, the Class 4 peptide can comprise an amino acid sequence of:

| | |
|---|---|
| Xaa₁-Xaa₂-Xaa₃-Thr-Gly-Phe; | (SEQ ID NO: 1368) |
| Xaa₂-Xaa₃-Thr-Gly-Phe; | (SEQ ID NO: 1369) |
| or | |
| Xaa₃-Thr-Gly-Phe; | (SEQ ID NO: 1370) |

wherein Xaa₁ is selected from a group consisting of: His, D-histidine, alpha, alpha-dimethyl imidiazole acetic acid (DMIA), N-methyl histidine, alpha-methyl histidine, imidazole acetic acid, desaminohistidine, hydroxyl-histidine, acetyl-histidine and homo-histidine; Xaa₂ is selected from a group consisting of: Ser, D-serine, D-alanine, valine, glycine, N-methyl serine, N-methyl alanine, and aminoisobutyric acid (AIB); and Xaa₃ is Gln or Glu.

[1003] The present invention also encompasses embodiments wherein the C-terminal amino acid of the Class 4 peptides have an amide group substituting for the carboxylic acid group that is present on the native amino acid.

[1004] In some embodiments, wherein the Class 4 peptide is PEGylated, the Class 4 peptide comprises the shortened glucagon peptides, specifically 6-29 where the “N-terminal” amino acid is PLA (phenyl-lactic acid). Such glucagon derivatives exhibit unique virtues. They are more potent peptides than those with the native N-terminal phenylalanine and they suppress any glucagon agonism that results from pegylation, something not seen with the native phenylalanine. Finally, while the current literature establishes that a substitution of the native aspartic acid at position 9 is required for antagonist activity, applicants have discovered the surprising result that such a substitution is no longer required in the PLA⁶-(6-29) glucagon analogs.

[1005] In some embodiments an amino acid of the Class 4 peptide is substituted with at least one cysteine residue, wherein the side chain of the cysteine residue is further modified with a thiol reactive reagent, including for example, maleimido, vinyl sulfone, 2-pyridylthio, haloalkyl, and haloacyl. These thiol reactive reagents may contain carboxy, keto, hydroxyl, and ether groups as well as other hydrophilic moieties such as polyethylene glycol units. In an alternative embodiment, an amino acid of the Class 4 peptide is substituted with lysine, and the side chain of the substituting lysine residue is further modified using amine reactive reagents such as active esters (succinimido, anhydride, etc) of carboxylic acids or aldehydes of hydrophilic moieties such as polyethylene glycol. In accordance with some embodiments the lysine residue corresponding to position 12 of the native peptide is substituted with arginine and a single lysine substitution is inserted for one of the amino acids corresponding to position 1, 16, 17, 20, 21, 24 or 29 of the native peptide, or a lysine is added to the N- or C-terminus of the Class 4 peptide.

[1006] In another embodiment the methionine residue corresponding to position 27 of the native peptide is changed to leucine or norleucine to prevent oxidative degradation of the peptide.

[1007] In some embodiments, the Class 4 peptides described herein are further modified by truncation or deletion of one or two amino acids of the C-terminus of the glucagon peptide (i.e., truncation of the amino acid at position 29 or at positions 28 and 29 of native glucagon) without affecting activity and/or potency at the glucagon receptor. In this regard, the Class 4 peptide described herein can, for example, consist essentially of or consist of amino acids 1-27, 1-28, 2-27, 2-28, 3-27, 3-28, 4-27, 4-28, 5-27, 5-28, 6-27, or 6-28 of the native glucagon peptide (SEQ ID NO: 1301) with one or more modifications resulting in Class 4 peptideic activity as described herein.

[1008] The presently disclosed Class 4 peptides also encompass amino acid substitutions at positions that are known not to be critical to the function of the glucagon peptide. In some embodiments the substitutions are conservative amino acid substitutions at one, two or three positions selected from the group consisting of 2, 5, 6, 7, 8, 9, 12, 13, 14, 15, 16, 19, 22, 23 or 24 of SEQ ID NO: 1339. In some embodiments the Class 4 peptide comprises a derivative peptide of SEQ ID NO: 1342 wherein the glucagon peptide comprises a further amino acid substitution relative to SEQ ID NO: 1342 at one to three amino acid positions selected from positions 2, 5, 6, 8, 9, 12, 13 and 14. In some embodiments the substitutions at positions 2, 5, 6, 8, 9, 12, 13 and 14 of SEQ ID NO: 1342 are conservative amino acid substitutions. In some embodiments the amino acids corresponding to positions 16, 17, 20, 21, 24 or 29 of the native peptide, and more particularly at position 21 and/or 24 are substituted with cysteine or lysine, wherein a PEG chain is covalently attached to the substituted cysteine or lysine residue.

[1009] In accordance with some embodiments the modified Class 4 peptide comprises two or more polyethylene glycol chains covalently bound to the peptide wherein the total molecular weight of the glucagon chains is about 1,000 to about 5,000 Daltons. In some embodiments the pegylated Class 4 peptide comprises a peptide selected from the group consisting of SEQ ID NO: 1312, and SEQ ID NO: 1322, wherein said peptide comprise a polyethylene glycol chain linked to the amino acid at positions 11 and 19 and the combined molecular weight of the two PEG chains is about 1,000 to about 5,000 Daltons.

[1010] In accordance with some embodiments a Class 4 peptide is provided comprising a modified glucagon peptide selected from the group consisting of:

(SEQ ID NO: 1309)
R₁-Phe-Thr-Ser-Xaa-Tyr-Ser-Xaa-Tyr-Leu-Xaa-Xaa-
Arg-Arg-Ala-Gln-Asp-Phe-Val-Gln-Trp-Leu-Xaa-Asn-
Thr-R₂,
(SEQ ID NO: 1310)
R₁-Phe-Thr-Ser-Xaa-Tyr-Ser-Xaa-Tyr-Leu-Asp-Ser-
Arg-Arg-Ala-Gln-Xaa-Phe-Val-Gln-Trp-Leu-Xaa-Asn-
Thr-R₂,
(SEQ ID NO: 1311)
R₁-Phe-Thr-Ser-Xaa-Tyr-Ser-Xaa-Tyr-Leu-Asp-Ser-
Arg-Arg-Ala-Gln-Asp-Phe-Val-Xaa-Trp-Leu-Xaa-Asn-
Thr-R₂
and
(SEQ ID NO: 1312)
R₁-Phe-Thr-Ser-Xaa-Tyr-Ser-Xaa-Tyr-Leu-Asp-Ser-
Arg-Arg-Ala-Gln-Xaa-Phe-Val-Xaa-Trp-Leu-Xaa-Asn-
Thr-R₂,

wherein Xaa at position 4=aspartic acid, glutamic acid, cysteic acid or homocysteic acid, Xaa at position 7=Lys or Arg, Xaa at position 10 is aspartic acid, cysteic acid, glutamic acid, homoglutamic acid and homocysteic acid; Xaa at position 11 is Ser, Lys, Cys, Orn, homocysteine or acetyl phenylalanine, Xaa at position 16 is Asp, Lys, Cys, Orn, homocysteine or acetyl phenylalanine a and Xaa at position 19 is Gln, Lys, Cys, Orn, homocysteine and acetyl phenylalanine, Xaa at position 22=Met, Leu or Nle, R₁ is OH or NH₂, and R₂ is COOH or CONH₂, wherein the peptide is pegylated at position 11 for SEQ ID NO: 1309, at position 16 for SEQ ID NO: 1310, position 19 for SEQ ID NO: 1311 and at positions 16 and 19 of SEQ ID NO: 1312, with the proviso that when Xaa at position 4=aspartic acid then R₁ is OH. In accordance with some embodiments the peptide comprises the sequence of SEQ ID NO: 1309, SEQ ID NO: 1310 or SEQ ID NO: 1311, wherein R₁ is OH and R₂ is CONH₂. In some embodiments the peptide comprises the sequence of SEQ ID NO: 1309, SEQ ID NO: 1310 or SEQ ID NO: 1311, wherein R₁ is OH, R₂ is CONH₂ and the amino acid at position 4 is aspartic acid, and in a further embodiment such peptides comprise a carboxy terminal extension comprising the sequence of SEQ ID NO: 1319.

[1011] In accordance with some embodiments the peptide comprises a sequence selected from the group consisting of SEQ ID NO: 1309, SEQ ID NO: 1310, SEQ ID NO: 1313, SEQ ID NO: 1314, and SEQ ID NO: 1316, wherein the peptide is pegylated at position 11 for SEQ ID NO: 1309 and SEQ ID NO: 1313, pegylated at position 16 for SEQ ID NO: 1310, and pegylated at position 19 for SEQ ID NO: 1310 and SEQ ID NO: 1314. In some embodiments the glucagon agonist comprises the peptide of SEQ ID NO: 1313 or SEQ ID NO: 1314. In some embodiments the C-terminal amino acid of the Class 4 peptides disclosed herein have an amide group in place of the carboxylic acid group that is present on the native amino acid. In accordance with some embodiments the Class 4 peptide comprises the sequence of SEQ ID NO: 1318.

[1012] In accordance with some embodiments, a Class 4 peptide is provided wherein a plasma protein has been covalently linked to an amino acid side chain of the peptide to improve the solubility, stability and/or pharmacokinetics of the glucagon peptide. For example, serum albumin can be covalently bound to the Class 4 peptides presented herein. In some embodiments the plasma protein is covalently bound to an amino acid corresponding to position 16, 17, 20, 21, 24 or 29 of the native glucagon peptide. More particularly, in some embodiments the plasma protein is bound to an amino acid corresponding to position 16 or 24 of the native glucagon peptide, wherein the Class 4 peptide comprises the sequence of SEQ ID NO: 1303, SEQ ID NO: 1304, SEQ ID NO: 1305, SEQ ID NO: 1306, SEQ ID NO: 1307, SEQ ID NO: 1308, SEQ ID NO: 1309, SEQ ID NO: 1311, SEQ ID NO: 1312, SEQ ID NO: 1322, SEQ ID NO: 1323, SEQ ID NO: 1324, SEQ ID NO: 1325, SEQ ID NO: 1326, SEQ ID NO: 1327, SEQ ID NO: 1328, SEQ ID NO: 1336 and SEQ ID NO: 1339. In some embodiments the Class 4 peptide comprises a peptide selected from the group consisting of SEQ ID NO: 1309, SEQ ID NO: 1310, SEQ ID NO: 1311 and SEQ ID NO: 1312.

[1013] In accordance with some embodiments, a Class 4 peptide is provided wherein a linear amino acid sequence representing the Fc portion of an immunoglobin molecule has been covalently linked to an amino acid side chain of a Class 4 peptide disclosed herein to improve the solubility, stability and/or pharmacokinetics of the glucagon peptide. For example, the amino acid sequence representing the Fc portion of an immunoglobin molecule can be covalently bound to position 11, 12, 15, 16, 19, 21 or 24 of the glucagon peptide of SEQ ID NO: 1307, SEQ ID NO: 1339, or a glucagon analog thereof. In some embodiments the Fc peptide is covalently bound to position 11 or 19 of the Class 4 peptide of SEQ ID NO: 1306, SEQ ID NO: 1307, SEQ ID NO: 1308 or SEQ ID NO: 1336. The Fc portion is usually isolated from IgG, but the Fc peptide fragment from any immunoglobin should function equivalently. In some embodiments the glucagon peptide is selected from the group consisting of SEQ ID NO: 1303, SEQ ID NO: 1304, SEQ ID NO: 1305, SEQ ID NO: 1307 SEQ ID NO: 1308, and SEQ ID NO: 1339, wherein the Fc portion is linked to the corresponding position of 16, 17, 20, 21, 24 or 29 of the native glucagon peptide. In some embodiments the Class 4 peptide comprises a glucagon peptide selected from the group consisting of SEQ ID NO: 1309, SEQ ID NO: 1310, SEQ ID NO: 1311 and SEQ ID NO: 1312, wherein the Fc peptide is bound to the side chain of the amino acid located at position 11, 16 or 19 of SEQ ID NO: 1309, SEQ ID NO: 1310, SEQ ID NO: 1311, respectively, and at both positions 11 and 19 for SEQ ID NO: 1312.

[1014] In certain embodiments of the invention, the Class 4 peptide comprises the amino acid sequence of any of SEQ ID NOs: 1362, 1364-1367, and 1371.

[1015] Modifications to Improve Solubility

[1016] The Class 4 peptides can be further modified to improve the peptide's solubility in aqueous solutions at physiological pH, while, in some aspects retaining a glucagon antagonist activity. Introduction of hydrophilic groups at positions corresponding to positions 1, 16, 17, 20, 21, 24 and 29 of the native peptide, or at the C-terminus, can improve the solubility of the resulting Class 4 peptide in solutions having a physiological pH, while retaining the parent compounds antagonist activity. Therefore, in some embodiments the presently disclosed Class 4 peptides are further modified to comprise one or more hydrophilic groups covalently linked to the side chains of amino acids corresponding to amino acid positions 1, 16, 17, 20, 21, 24 and 29 of the native glucagon peptide or of the N- or C-terminal amino acid. In a further embodiment the side chains of amino acids corresponding to amino acid positions 16 and 24 of the native glucagon peptide are covalently bound to hydrophilic groups, and in some embodiments the hydrophilic group is polyethylene glycol (PEG).

[1017] Applicants have also discovered that native glucagon can be modified by introducing charge at its carboxy terminus to enhance the solubility of the peptide while retaining the agonist properties of the peptide. The enhanced solubility allows for the preparation and storage of glucagon solutions at near neutral pH. Formulating glucagon solutions at relatively neutral pHs (e.g. pH of about 6.0 to about 8.0) improves the long term stability of the Class 4 peptides.

[1018] Again, applicants anticipate that the Class 4 peptides disclosed herein can be similarly modified to enhance their solubility in aqueous solutions at relatively neutral pH (e.g. pH of about 6.0 to about 8.0) while retaining the antagonist properties of the parent protein. Accordingly, some embodiments of the present invention is directed to a Class 4 peptide of SEQ ID NO: 1339 that has been further modified relative to the native amino acids present at positions 6-29 of the wild type glucagon (SEQ ID NO: 1301) to add charge to the peptide by the substitution of native non-charged amino acids with charged amino acids, or the addition of charged amino acids to the carboxy terminus. In accordance with some embodiments, one to three of the non-charged native amino acids of the Class 4 peptide of SEQ ID NO: 1339 are replaced with a charged amino acid. In some embodiments the charged amino acid is selected from the group consisting of lysine, arginine, histidine, aspartic acid and glutamic acid. More particularly, applicants have discovered that substituting the normally occurring amino acid at corresponding position 28 and/or 29 relative to native glucagon with charged amino acids, and/or the addition of one to two charged amino acids at the carboxy terminus of the Class 4 peptide, enhances the solubility and stability of the Class 4 peptides in aqueous solutions at physiologically relevant pHs (i.e., a pH of about 6.5 to about 7.5). Accordingly, such modifications of the Class 4 peptide disclosed herein are anticipated to have a similar effect on the solubility in aqueous solutions, particularly at a pH ranging from about 5.5 to about 8.0, while retaining the parent peptide's biological activity

[1019] In accordance with some embodiments the Class 4 peptide of SEQ ID NO: 1339 is modified by the substitution of the native amino acid at corresponding position 28 and/or 29 relative to native glucagon with a negatively charged amino acid (e.g., aspartic acid or glutamic acid) and optionally the addition of a negatively charged amino acid (e.g., aspartic acid or glutamic acid) to the carboxy terminus of the peptide. In an alternative embodiment the Class 4 peptide of SEQ ID NO: 1339 is modified by the substitution of the native amino acid at corresponding position 29 relative to native glucagon with a positively charged amino acid (e.g., lysine, arginine or histidine) and optionally the addition of one or two positively charged amino acid (e.g., lysine, arginine or histidine) on the carboxy terminus of the peptide. In accordance with some embodiments a Class 4 peptide having improved solubility and stability is provided wherein the peptide comprises the amino acid sequence of SEQ ID NO: 1341 with the proviso that at least one amino acids at position, 23, or 24 of SEQ ID NO: 1341 is substituted with an acidic amino acid, and/or an additional acidic amino acid is added at the carboxy terminus of SEQ ID NO: 1341. In some embodiments the acidic amino acids are independently selected from the group consisting of Asp, Glu, cysteic acid and homocysteic acid.

[1020] In accordance with some embodiments a Class 4 peptide having improved solubility and stability is provided wherein the antagonist comprises the amino acid sequence of SEQ ID NO: 1341, SEQ ID NO: 1342, SEQ ID NO: 1343 or SEQ ID NO: 1344, wherein at least one of the amino acids at positions 23 or 24 is substituted with a non-native amino acid residue (i.e. at least one amino acid present at position 23 or 24 of the analog is an acidic amino acid different from the amino acid present at the corresponding position in SEQ ID NO: 1307). In accordance with some embodiments a glucagon agonist is provided comprising the sequence of SEQ ID NO: 1341 or 1342 with the proviso that when the amino acid at position 23 is asparagine and the amino acid at position 24 is threonine, the peptide further comprises one to two amino acids, independently selected from the group consisting of Lys, Arg, His, Asp or Glu, added to the carboxy terminus of the Class 4 peptide.

[1021] In another embodiment the solubility of the Class 4 peptide of SEQ ID NO: 1342 can be improved by covalently linking a hydrophilic moiety to an amino acid residue at position 11, 12, 15, 16, 19 or 24, and in some embodiments the hydrophilic moiety is linked to an amino acid at position 11, 16 or 19, and in a further embodiment the hydrophilic moiety is linked to amino acid 19. In some embodiments the hydrophilic moiety is a plasma protein or the Fc portion of an immunoglobin, and in an alternative embodiment the hydrophilic moiety is a hydrophilic hydrocarbon chain. In some embodiments the hydrophilic moiety is polyethylene glycol, having a molecular weight selected from the range of about 1,000 to about 5,000 Daltons. In another embodiment the hydrophilic moiety is polyethylene glycol, having a molecular weight of at least about 20,000 Daltons. In some embodiments the polyethylene modified Class 4 peptide comprises the amino acids sequence of SEQ ID NO: 1309, SEQ ID NO: 1310, SEQ ID NO: 1311, SEQ ID NO: 1312, SEQ ID NO: 1343, SEQ ID NO: 1344 or SEQ ID NO: 1345.

[1022] Modifications to Improve Stability

[1023] The Asp-Ser sequence at position 15-16 of native glucagon has been identified as a uniquely unstable dipeptide that leads to premature chemical cleavage of the native hormone in aqueous buffers. For example, when maintained at 0.01N HCl at 37° C. for 2 weeks, more than 50% of the native glucagon may be cleaved into fragments. The two liberated cleavage peptides 1-15 and 16-29 are devoid of glucagon-like biological activity and thus represent a limitation on the aqueous pre-formulation of glucagon and its related analogs. The selective chemical substitution of the Asp at position 15 of the native glucagon peptide with Glu has been observed to virtually eliminate chemical cleavage of the 15-16 peptide bond.

[1024] Accordingly, it is expected that the Class 4 peptides of the present invention can be similarly modified to decrease their susceptibility to premature chemical cleavage in aqueous buffers. In accordance with some embodiments the Class 4 peptides described herein can be further modified to enhance their stability in aqueous solutions by replacing the native aspartic amino acid, located at position 15 of the native glucagon peptide, with an amino acid selected from the group consisting of cysteic acid, glutamic acid, homoglutamic acid and homocysteic acid. In accordance with some embodiments the aspartic acid residue at position 10 of the Class 4 peptide of SEQ ID NO: 1339 can be substituted with an amino acid selected from the group consisting of cysteic acid, glutamic acid, homoglutamic acid and homocysteic acid, and in some embodiments the native aspartic acid at position 10 of SEQ ID NO: 1339 is replaced with glutamic acid. In accordance with some embodiments a Class 4 peptide having improved stability in aqueous solutions is provided wherein the antagonist comprises a sequence selected from the group consisting of SEQ ID NO: 1336, SEQ ID NO: 1340 and SEQ ID NO: 1342. In a further embodiment the Class 4 peptide is amidated.

[1025] In accordance with some embodiments, increased stability by way of reduced degradation of the Class 4 peptide described herein may also be achieved by substitution of the serine at position 16 (according to the numbering of native glucagon) with glutamic acid, cysteic acid, homo-glutamic acid, or homo-cysteic acid. In a specific embodiment, the serine at position 16 (according to the native glucagon sequence numbering) is replaced with glutamic acid. In a more specific aspect, the Class 4 peptide comprising such a modification comprises a C-terminal carboxylate and is not amidated.

[1026] In accordance with some embodiments, a Class 4 peptide is provided comprising a glucagon peptide selected from the group consisting of SEQ ID NO: 1307, SEQ ID NO: 1336, SEQ ID NO: 1339, SEQ ID NO: 1340, SEQ ID NO: 1341, SEQ ID NO: 1342, SEQ ID NO: 1343 and SEQ ID NO: 1344, further modified by one or more additional amino acid substitutions at positions corresponding to positions 11, 12, 15, 16, 19 and/or 24 of the native glucagon peptide, wherein the amino acid substitutions comprise a substitution with an amino acid having a side chain suitable for crosslinking with hydrophilic moieties, including for example, PEG. The peptide can be substituted with a naturally occurring amino acid or a synthetic (non-naturally occurring) amino acid. Synthetic or non-naturally occurring amino acids refer to amino acids that do not naturally occur in vivo but which, nevertheless, can be incorporated into the peptide structures described herein. In some embodiments a Class 4 peptide is provided wherein the peptide comprises the sequence of SEQ ID NO: 1307, SEQ ID NO: 1336, SEQ ID NO: 1339, SEQ ID NO: 1340, SEQ ID NO: 1341, SEQ ID NO: 1342, SEQ ID NO: 1343 and SEQ ID NO: 1344, and further comprises a polyethylene glycol chain bound to corresponding position 21 or 24 of the native glucagon peptide. In a further embodiment the C-terminus of the Class 4 peptide is modified to replace the carboxylic acid group with an amide group.

[1027] Fusion Peptides and Conjugates

[1028] The present disclosure also encompasses Class 4 peptide fusion peptides wherein a second peptide has been fused to the C-terminus of the Class 4 peptide. More particularly, the fusion peptide may comprise a Class 4 peptide of SEQ ID NO: 1344 that further comprises an amino acid sequence of SEQ ID NO: 1319 (GPSSGAPPPS), SEQ ID NO: 1320 (Lys Arg Asn Arg Asn Asn Ile Ala) or SEQ ID NO: 1321 (Lys Arg Asn Arg) linked to the c-terminal amino acid of the Class 4 peptide. In some embodiments the amino acid sequence of SEQ ID NO: 1319 (GPSSGAPPPS) is bound to amino acid 24 of the Class 4 peptide of SEQ ID NO: 1342 through a peptide bond. In another embodiment the fusion peptide comprises a Class 4 peptide of SEQ ID NO: 1307, SEQ ID NO: 1336, SEQ ID NO: 1339, SEQ ID NO: 1340, SEQ ID NO: 1341 or SEQ ID NO: 1343 that further comprises an amino acid sequence of SEQ ID NO: 1319 (GPSSGAPPPS) linked to amino acid 24 of the Class 4 peptide. In another embodiment the fusion peptide comprises a Class 4 peptide peptide of SEQ ID NO: 1307, SEQ ID NO: 1336, SEQ ID NO: 1337, SEQ ID NO: 1338, SEQ ID NO: 1339, SEQ ID NO: 1341 or SEQ ID NO: 1343 that further comprises an amino acid sequence of SEQ ID NO: 1320, SEQ ID NO: 1321 or SEQ ID NO: 1353 linked to amino acid 24 of the Class 4 peptide. In some embodiments the Class 4 peptide fusion peptide comprises a sequence selected from the group consisting of SEQ ID NO: 1346 and SEQ ID NO 1347. In a further embodiment the C-terminus of the fusion peptide is modified to replace the carboxylic acid group with an amide group.

[1029] In some embodiments a Class 4 peptide fusion peptide is provided wherein the Class 4 peptide portion of the fusion peptide is selected from the group consisting of SEQ ID NO: 1303, SEQ ID NO: 1304, SEQ ID NO: 1305, SEQ ID NO: 1306, SEQ ID NO: 1307, SEQ ID NO: 1308, SEQ ID NO: 1309, SEQ ID NO: 1311, SEQ ID NO: 1312, SEQ ID NO: 1313, SEQ ID NO: 1314, SEQ ID NO: 1315, SEQ ID NO: 1310, SEQ ID NO: 1316, SEQ ID NO: 1317, SEQ ID NO: 1318 and SEQ ID NO: 1339 and the sequence of SEQ ID NO: 1319 is fused to the carboxy terminus of the Class 4 peptide portion, and wherein the PEG chain, when present, is selected from the range of 500 to 40,000 Daltons. More particularly, in some embodiments the Class 4 peptide segment is selected from the group consisting of SEQ ID NO: 1313, SEQ ID NO: 1314, SEQ ID NO: 1315, SEQ ID NO: 1316, SEQ ID NO: 1346 and SEQ ID NO: 1347 wherein the PEG chain is selected from the range of about 500 to about 5,000 Daltons, and more particularly, in some embodiments the PEG chain is about 1,000 Daltons. In a further embodiment the C-terminus is modified to replace the carboxylic acid group with an amide group.

[1030] The Class 4 peptide may further comprise one to two charged amino acids added to the carboxy terminus. In some embodiments, wherein one to two charged amino acids are added to the carboxy terminus of SEQ ID NO: 1344, the amino acids are negatively charged amino acids, including for example glutamic acid and aspartic acid. In some embodiments, the Class 4 peptide comprises the sequence of SEQ ID NO: 1342 wherein at least one of corresponding positions 27 and 28 relative to the native glucagon peptide comprises an amino acid selected from the group consisting of aspartic acid and glutamic acid and wherein SEQ ID NO: 1342 is optionally modified to include an addition one to two negatively charged amino acids added to the carboxy terminus. In some embodiments the negatively charged amino acids are glutamic acid or aspartic acid.

[1031] The Class 4 peptides disclosed herein can be combined with other active agents, including for example, insulin, to treat diseases or conditions that are characterized by excessive glucagon activity. In some embodiments, Class 4 peptides that have been modified to be covalently bound to a PEG chain having a molecular weight of greater than 10,000 Daltons can be administered in conjunction with insulin to help to maintain stable blood glucose levels in diabetics. The Class 4 peptides of the present disclosure can be co-administered with insulin as a single composition, simultaneously administered as separate solutions, or alternatively, the insulin and the Class 4 peptide can be administered at different times relative to one another. In some embodiments the composition comprising insulin and the composition comprising the Class 4 peptide are administered within 12 hours of one another. The exact ratio of the Class 4 peptide relative to the administered insulin will be dependent in part on determining the glucagon levels of the patient, and can be determined through routine experimentation.

[1032] Dimer Peptides

[1033] The present disclosure also encompasses multimers of the modified Class 4 peptides disclosed herein. Two or more of the modified Class 4 peptides can be linked together using standard linking agents and procedures known to those skilled in the art. For example, dimers can be formed between two modified Class 4 peptides through the use of bifunctional thiol crosslinkers and bi-functional amine crosslinkers, particularly for Class 4 peptides that have been substituted (at positions 11, 16 or 19, for example) with cysteine, lysine ornithine, homocysteine or acetyl phenylalanine residues (e.g. SEQ ID NO: 1309, SEQ ID NO: 1310, SEQ ID NO: 1311 and SEQ ID NO: 1312). The dimer can be a homodimer or alternatively can be a heterodimer. In some embodiments the dimer is formed between two Class 4 peptides independently selected from the group consisting of SEQ ID NO: 1308, SEQ ID NO: 1309, SEQ ID NO: 1310, SEQ ID NO: 1311, SEQ ID NO: 1312, SEQ ID NO: 1345, SEQ ID NO: 1346, or SEQ ID NO: 1347, wherein the two peptides are linked to one another via a linker attached to position 11 of each peptide, 16 of each peptide, or position 19 of each peptide or any combination thereof. In some embodiments the linkage is a disulfide linkage between a Cys11 to Cys11 or a Cys19 to Cys19 or a Cys11 to Cys19 residue of the respective Class 4 peptide peptides.

[1034] Similarly, a dimer can be formed between two Class 4 peptide peptides independently selected form the group consisting of SEQ ID NO: 1303, SEQ ID NO: 1304, SEQ ID NO: 1305, SEQ ID NO: 1306, SEQ ID NO: 1307, SEQ ID NO: 1308, SEQ ID NO: 1309, SEQ ID NO: 1310, SEQ ID NO: 1311, SEQ ID NO: 1312, SEQ ID NO: 1336, SEQ ID NO: 1337, SEQ ID NO: 1338, SEQ ID NO: 1339 and SEQ ID NO: 1342 wherein the linkage is formed between amino acid positions independently selected from positions 16, 21 and 24 with respect to the native glucagon peptide.

[1035] In accordance with some embodiments a Class 4 peptide dimer is provided comprising two Class 4 peptides, each comprising the sequence of SEQ ID NO: 1346, wherein the two antagonists are linked to one another by a disulfide bond through amino acid position 25. In another embodiment a Class 4 peptide dimer is provided comprising two Class 4 peptides, each comprising the sequence of SEQ ID NO: 1347, wherein the two antagonists are linked to one another by a disulfide bond through amino acid position 35. In some embodiments the dimer is formed from Class 4 peptides of SEQ ID NO: 1346 and SEQ ID NO: 1347 wherein the amino acid at position 10 is glutamic acid.

[1036] In some embodiments the dimer comprises a homodimer of a Class 4 peptide fusion peptide selected from the group consisting of SEQ ID NO: 1307, SEQ ID NO: 1308, SEQ ID NO: 1336, SEQ ID NO: 1337, SEQ ID NO: 1340, SEQ ID NO: 1339, NO: 1340, SEQ ID NO: 1341, SEQ ID NO: 1342 and pharmaceutically acceptable salts of said Class 4 peptides. In accordance with some embodiments a dimer is provided comprising a first Class 4 peptide bound to a second Class 4 peptide via a linker, wherein the first and second peptides of the dimer are independently selected from the group consisting of SEQ ID NO: 1307, SEQ ID NO: 1308, SEQ ID NO: 1336, SEQ ID NO: 1337, SEQ ID NO: 1339, SEQ ID NO: 1340, SEQ ID NO: 1341, and SEQ ID NO: 1342, and pharmaceutically acceptable salts of said glucagon polypeptides. In another embodiment the first and second Class 4 peptides of the dimer are independently selected from the group consisting of SEQ ID NO: 1307, SEQ ID NO: 1308, SEQ ID NO: 1336 and SEQ ID NO: 1339.

[1037] In another embodiment the dimer comprises a homodimer of a Class 4 peptide selected from the group consisting of SEQ ID NO: 1323, SEQ ID NO: 1324, SEQ ID NO: 1325, SEQ ID NO: 1326, SEQ ID NO: 1327, SEQ ID NO: 1328, SEQ ID NO: 1329, SEQ ID NO: 1330, SEQ ID NO: 1331. In another embodiment, a Class 4 peptide dimer is provided wherein the first and second peptides of the dimer comprise an amino acid sequence independently selected from the group consisting of SEQ ID NO: 1323, SEQ ID NO: 1324, SEQ ID NO: 1325, SEQ ID NO: 1326, SEQ ID NO: 1327 and SEQ ID NO: 1328. In another embodiment the dimer comprises a homodimer of a Class 4 peptide selected from the group consisting of SEQ ID NO: 1309, SEQ ID NO: 1311 and SEQ ID NO: 1312, wherein the peptide further comprises a polyethylene glycol chain covalently bound to position 11 or 19 of the glucagon peptide.

[1038] The Class 4 glucagon related peptide may comprise the amino acid sequence of any of SEQ ID NOs: 1301-1371, optionally with up to 1, 2, 3, 4, or 5 further modifications that retain glucagon antagonist activity.

[1039] Class 5 Glucagon Related Peptides

[1040] In certain embodiments, a glucagon related peptide is a class 5 glucagon related peptide (see, e.g., International (PCT) Patent Application No. PCT/US2008/081333, incorporated herein by reference in its entirety).

[1041] All biological sequences referenced in the following section (SEQ ID NOs: 1401-1518) correspond to SEQ ID NOs.: 1-118 in International Patent Application No. PCT/US2008/081333.

[1042] Activity

[1043] In certain aspects a class 5 glucagon related peptide (hereafter referred to as a “class 5 peptide”) may be a glucagon antagonist/GLP-1 agonist. Glucagon antagonists/GLP-1 agonists are utilized in any setting where the suppression of glucagon agonism is desired while simultaneous stimulation of GLP-1 activity is also desired. For example, glucagon antagonist activity in conjunction with GLP-1 stimulation can be used in the treatment of diabetes where glucagon antagonism has been demonstrated in pre-clinical models of hyperglycemia to yield a lowering of blood glucose and GLP-1 activity is associated with insulin production. Compounds demonstrating GLP-1 activity have also been known to be useful for treating obesity and preventing weight gain.

[1044] In certain aspects class 5 peptides are believed to be suitable for any use that has previously been described for other glucagon antagonist/GLP-1 agonists. These two activities have separately been shown to be highly desirable properties for the treatment of the metabolic syndrome, specifically diabetes and obesity. The glucagon antagonist activity is useful in any setting where the suppression of glucagon agonism is desired. The presence of GLP-1 agonism further suppresses the endogenous secretion of glucagon from the pancreas while stimulating insulin synthesis and secretion. The two pharmacological actions serve in a synergistic fashion to normalize metabolic abnormalities. Accordingly, the Class 5 peptides can be used to treat hyperglycemia, or treat other metabolic diseases that result from high blood levels of glucagon or high blood glucose levels. In accordance with some embodiments the patient to be treated using the glucagon antagonist/GLP-1 agonists such as class 5 peptides disclosed herein is a domesticated animal, and in another embodiment the patient to be treated is a human. Studies suggest that lack of glucagon suppression in diabetic patients contributes to postprandial hyperglycemia in part via accelerated glycogenolysis. Analysis of blood glucose during an Oral Glucose Tolerance Test (OGTT), and in the presence or absence of somatostatin-induced glucagon suppression has shown a significant increase in glucose in subjects with higher glucagon levels. Accordingly, a glucagon antagonist/GLP-1 agonists or Class 5 peptides described herein can be used to treating hyperglycemia, and are expected to be useful for treating a variety of types of diabetes including diabetes mellitus type I, diabetes mellitus type II, or gestational diabetes, either insulin-dependent or non-insulin-dependent, and reducing complications of diabetes including nephropathy, retinopathy and vascular disease.

[1045] Such methods for reducing appetite or promoting loss of body weight are expected to be useful in reducing body weight, preventing weight gain, or treating obesity of various causes, including drug-induced obesity, and reducing complications associated with obesity including vascular disease (coronary artery disease, stroke, peripheral vascular disease, ischemia reperfusion, etc.), hypertension, onset of diabetes type II, hyperlipidemia and musculoskeletal diseases.

[1046] Pharmaceutical compositions comprising class 5 peptides can be formulated and administered to patients using standard pharmaceutically acceptable carriers and routes of administration known to those skilled in the art. Accordingly, the present disclosure also encompasses pharmaceutical compositions comprising one or more class 5 peptides disclosed herein in combination with a pharmaceutically acceptable carrier. The pharmaceutical compositions may comprise the class 5 peptides as the sole pharmaceutically active component, or the class 5 peptides can be combined with one or more additional active agents. In accordance with some embodiments a composition is provided comprising a Class 5 peptide and insulin or an insulin analog. Alternatively, a composition is provided for inducing weight loss or preventing weight gain can be provided that comprises the sequence of SEQ ID NO: 1415 or SEQ ID NO: 1451 further comprising the amino acid sequence of SEQ ID NO: 1421 (GPSSGAPPPS) or SEQ ID NO: 1450 linked to amino acid 24 of SEQ ID NO: 1415 or SEQ ID NO: 1451, and an anti-obesity peptide. Suitable anti-obesity peptides include those disclosed in U.S. Pat. Nos. 5,691,309, 6,436,435 or US Patent application 20050176643.

[1047] Class 5 Peptide Structure

[1048] In accordance with some embodiments a Class 5 peptide is provided comprising a glucagon peptide that has been modified by the deletion of the first 1 to 5 amino acids residues (e.g., first amino acid, first two amino acids, first three amino acids, first four amino acids, first five amino acids) from the N-terminus, and stabilization of the alpha-helix structure in the C-terminal portion of the compound (around amino acid positions 12-29 according to the amino acid numbering of wild type glucagon, SEQ ID NO: 1401), e.g., by the linkage of the side chains of amino acid pairs, selected from positions 12 and 16, 16 and 20, 20 and 24, and 24 and 28 (relative to the native glucagon peptide sequence), to one another through hydrogen-bonding or ionic interactions, such as the formation of salt bridges, or by covalent bonds. Alternatively, stabilization of the alpha-helix around residues 12-29 is achieved through introduction of one or more α,α-disubstituted amino acids at positions that retain the desired activity. In some embodiments, one, two, three, four or more of positions 16, 17, 18, 19, 20, 21, 24 or 29 (according to the amino acid numbering of wild type glucagon) of the Class 5 peptide or analog thereof is substituted with an α,α-disubstituted amino acid. For example, substitution of position 16 (according to the amino acid numbering of wild type glucagon) of a Class 5 peptide or analog thereof with amino iso-butyric acid (AIB) provides a stabilized alpha helix in the absence of a salt bridge or lactam. In some embodiments, one, two, three or more of positions 16, 20, 21 or 24 (according to the amino acid numbering of wild type glucagon) are substituted with AIB

[1049] In accordance with some embodiments, a class 5 peptide is provided wherein the peptide exhibits at least 80% of the maximum agonism achieved by native GLP-1 at the GLP-1 receptor, and exhibits glucagon antagonist activity that reduces the maximum glucagon-induced cAMP production at the glucagon receptor by at least about 50%, as measured by cAMP production in an in vitro assay. In some embodiments, the class 5 peptide exhibits at least 90% of the activity of native GLP-1 at the GLP-1 receptor, and exhibits glucagon antagonist activity, that reduces the maximum glucagon-induced cAMP production at the glucagon receptor by at least about 80%.

[1050] In accordance with some embodiments the class 5 peptide comprises a derivative peptide of SEQ ID NO: 1402 wherein the peptide comprises further amino acid substitutions relative to SEQ ID NO: 1402 at one to three amino acid positions selected from positions 1, 2, 4, 5, 6, 7, 8, 9, 10, 11, 12, 13, 14, 15, 16, 19, 22 and 24, and exhibits at least 90% of the activity of native GLP-1 at the GLP-1 receptor, and exhibits glucagon antagonist activity, that reduces the maximum glucagon-induced cAMP production at the glucagon receptor by at least about 80%.

[1051] In some embodiments, the alpha-helix structure in the C-terminal portion of the Class 5 peptide (around amino acids 12-29 according to the amino acid numbering of wild type glucagon) is stabilized by, e.g., formation of a covalent or non-covalent intramolecular bridge, or substitution and/or insertion of amino acids around positions 12-29 with an alpha helix-stabilizing amino acid (e.g., an α,α-disubstituted amino acid). In some embodiments, one, two, three, four or more of positions 16, 17, 18, 19, 20, 21, 24 or 29 (according to the amino acid numbering of wild type glucagon) of the Class 5 peptide or analog thereof is substituted with an α,α-disubstituted amino acid e.g., amino isobutyric acid (AIB). For example, substitution of position 16 (according to the amino acid numbering of wild type glucagon) of a Class 5 peptide or analog thereof with amino iso-butyric acid (AIB) provides a stabilized alpha helix in the absence of a salt bridge or lactam.

[1052] In some embodiments the class 5 peptide comprises SEQ ID NO: 1415 or SEQ ID NO: 1451, and more particularly, a sequence selected from the group consisting of SEQ ID NO: 1405, SEQ ID NO: 1406, SEQ ID NO: 1407, SEQ ID NO: 1408, SEQ ID NO: 1409, SEQ ID NO: 1416, SEQ ID NO: 1417, SEQ ID NO: 1418, SEQ ID NO: 1419, SEQ ID NO: 1422, SEQ ID NO: 1423, SEQ ID NO: 1424 and SEQ ID NO: 1425. In further embodiments the class 5 peptide comprises a derivative peptide of SEQ ID NO: 1415 or SEQ ID NO: 1451 wherein the peptide comprises a further amino acid substitution relative to SEQ ID NO: 1415 or SEQ ID NO: 1451 at one to three amino acid positions selected from positions 1, 2, 5, 6, 8, 9, 12, 13 and 14. In some embodiments the substitutions at positions 1, 2, 5, 6, 8, 9, 12, 13 and 14 are conservative amino acid substitutions. In some embodiments the threonine at position 24 of SEQ ID NO: 1405 or SEQ ID NO: 1406 is substituted with glycine.

[1053] In accordance with some embodiments the class 5 peptide represents a further modification of the peptide wherein in addition to the N-terminal deletion, the phenylalanine at position 6 of the native glucagon peptide is modified, e.g., to comprise a hydroxyl group in place of the N-terminus amino group. In a further embodiment the natural carboxylic acid of the C-terminal amino acid is replaced with a charge-neutral group, such as an amide or ester.

[1054] In accordance with some embodiments, Class 5 peptides have been prepared wherein the first three to five amino acids of native glucagon have been deleted, the amino acid at position 9, relative to the native glucagon peptide, has been substituted with an amino acid selected from the group consisting of glutamic acid, homoglutamic acid, β-homoglutamic acid, a sulfonic acid derivative of cysteine, or an alkylcarboxylate derivative of cysteine having the structure of:

[chemical structure]

[1055] wherein X₅ is C₁-C₄ alkyl, C₂-C₄ alkenyl, or C₂-C₄ alkynyl, and the alpha-helix structure in the C-terminal portion of glucagon (around amino acids 12-29 according to the amino acid numbering of wild type glucagon) is stabilized, e.g., via a lactam bridge is formed between the side chains of amino acids 12 and 16 or between amino acids 16 and 20, relative to the native glucagon peptide. Examples of amino acid pairings that are capable of covalently bonding to form a seven-atom linking bridge are detailed through-out this disclosure. In some embodiments, the sulfonic acid derivative of cysteine is cysteic acid or homocysteic acid.

[1056] In some embodiments a class 5 is provided comprising an amino acid sequence selected from the group consisting of SEQ ID NO: 1405, SEQ ID NO: 1406, SEQ ID NO: 1407, or SEQ ID NO: 1408, wherein said peptide comprises a lactam ring formed between the side chains of amino acids 7 and 11 for SEQ ID NO: 1405, between 11 and 15 for SEQ ID NO: 1406, between positions 15 and 19 for SEQ ID NO: 1407 and between positions 19 and 24 for SEQ ID NO: 1408, each of said sequences being further modified to comprise a hydrophilic moiety covalently bound to the peptide. More particularly, in some embodiments each of the lactam bearing class 5 peptide are modified by covalent attachment of a polyethylene glycol chain. For example, for a class 5 peptide comprising SEQ ID NO: 1405, the peptide is pegylated at a position selected from the group consisting of 12, 15, 16, 19 and 24; for a class 5 peptide comprising SEQ ID NO: 1406, the peptide is pegylated at a position selected from the group consisting of 12, 16, 19 and 24; for a class 5 peptide comprising SEQ ID NO: 1407, the peptide is pegylated at a position selected from the group consisting of 11, 12, 16 and 24; for class 5 peptide comprising SEQ ID NO: 1408, the peptide is pegylated at a position selected from the group consisting of 11, 12, 15 and 16. In accordance with some embodiments a class 5 peptide comprising SEQ ID NO: 1447 or SEQ ID NO: 1448 is provided wherein the peptide is pegylated at a position selected from the group consisting of 12, 16, 19 and 24, relative to the SEQ ID NO: 1447 or SEQ ID NO: 1448 sequence. In a further embodiment the peptide of SEQ ID NO: 1447 or SEQ ID NO: 1448 is further modified by the addition of the sequence of SEQ ID NO: 1421 to the carboxy terminus of the peptide.

[1057] As detailed above in certain aspects Class 5 peptides are provided wherein the first five amino acids of native glucagon have been deleted, the amino group of the N-terminal amino acid (phenylalanine) has been replaced with a hydroxyl group (i.e., the first amino acid is phenyl-lactic acid) and the side chains of one or more amino acid pairs selected from positions 12 and 16, 16 and 20, 20 and 24, and 24 and 28 are linked to one another, thus stabilizing the Class 5 peptide alpha helix.

[1058] In accordance with some embodiments a class 5 peptide is provided comprising the sequence of SEQ ID NO: 1402 that is modified by a substitution of the serine residue at position 11 of SEQ ID NO: 1402 (position 16 according to the amino acid numbering of native glucagon) with an amino acid selected from the group consisting of glutamic acid, glutamine, homoglutamic acid, homocysteic acid, threonine or glycine. In accordance with some embodiments the serine residue at position 11 of SEQ ID NO: 1402 is substituted with an amino acid selected from the group consisting of glutamic acid, glutamine, homoglutamic acid and homocysteic acid, and in some embodiments the serine residue is substituted with glutamic acid. In accordance with some embodiments the class 5 peptide comprises the sequence of SEQ ID NO: 1438.

[1059] In some embodiments a class 5 peptide is provided wherein an intramolecular bridge is formed between two amino acid side chains to stabilize the three dimensional structure of the carboxy terminus of the peptide of SEQ ID NO: 1402. More particularly, the side chains of one or more amino acids selected from amino acid pairs 7 and 11, 11 and 15, 15 and 19 or 19 and 23 of SEQ ID NO: 1402 are linked to one another, thus stabilizing the alpha helix in the C-terminal portion. The two side chains can be linked to one another through hydrogen-bonding, ionic interactions (such as the formation of salt bridges), or by covalent bonds. In accordance with some embodiments the size of the linker is 7-9 atoms, and in some embodiments the size of the linker is 8 atoms. In some embodiments the class 5 peptide is selected from the group consisting of SEQ ID NO: 1405, SEQ ID NO: 1406, SEQ ID NO: 1407 and SEQ ID NO: 1408. In some embodiments the C-terminal amino acid of the class 5 peptide have an amide group substituting for the carboxylic acid group that is present on the native amino acid.

[1060] In accordance with some embodiments class 5 peptide is provided wherein the analog comprises an amino acid sequence of SEQ ID NO: 1409. In some embodiments the three dimensional structure of the carboxy terminus of the peptide of SEQ ID NO: 1409 is stabilized by the formation of covalent bonds between the side chains of the peptide. In some embodiments two amino acid side chains are bound to one another to form a lactam ring. The size of the lactam ring can vary depending on the length of the amino acid side chains, and in some embodiments the lactam is formed by linking the side chains of a lysine amino acid to a glutamic acid side chain. In some embodiments the C-terminal amino acid of the class 5 peptides have an amide group substituting for the carboxylic acid group that is present on the native amino acid.

[1061] The order of the amide bond in the lactam ring can be reversed (e.g., a lactam ring can be formed between the side chains of a Lys12 and a Glu16 or alternatively between a Glu 12 and a Lys16). In accordance with some embodiments a glucagon analog of SEQ ID NO: 1409 is provided wherein at least one lactam ring is formed between the side chains of an amino acid pair selected from the group consisting of amino acid pairs 7 and 11, 11 and 15, 15 and 19 or 19 and 23 of SEQ ID NO: 1409. In some embodiments a class 5 peptide is provided wherein the peptide comprises the sequence of SEQ ID NO: 1410, said sequence further comprising an intramolecular lactam bridge formed between amino acid positions 7 and 11, or between amino acid positions 11 and 15, or between amino acid positions 15 and 19 of SEQ ID NO: 1410. In some embodiments a class 5 peptide is provided wherein the peptide comprises the sequence of SEQ ID NO: 1411, said sequence further comprising an intramolecular lactam bridge formed between amino acid positions 7 and 11, or between amino acid positions 11 and 15 of SEQ ID NO: 1411. In some embodiments the class 5 peptide comprises the sequence of SEQ ID NO: 1417.

[1062] Additional class 5 peptide are provided comprising derivatives of SEQ ID NO: 1405, wherein the aspartic acid at position 10 of SEQ ID NO: 1405 (position 15 of native glucagon) has been substituted with glutamic acid, an amino acid of the general structure:

[chemical structure]

[1063] wherein X₆ is C₁-C₃ alkyl, C₂-C₃ alkene or C₂-C₃ alkynyl, and in some embodiments X₆ is C₁-C₃ alkyl, and in another embodiment X₆ is C₂ alkyl. In some embodiments a Class 5 peptide derivative of SEQ ID NO: 1409 is provided wherein position 10 of SEQ ID NO: 1409 (position 15 of native glucagon) is substituted with an amino acid selected from the group consisting of glutamic acid, cysteic acid, homocysteic acid and homoglutamic acid. In a further embodiment position 10 of SEQ ID NO: 1409 is substituted with an amino acid selected from the group consisting of cysteic acid or homocysteic acid. In some embodiments a Class 5 peptide derivative of SEQ ID NO: 1406, SEQ ID NO: 1407 or SEQ ID NO: 1408 is provided wherein position 10 of SEQ ID NO: 1406, SEQ ID NO: 1407 or SEQ ID NO: 1408 is substituted with an amino acid selected from the group consisting of glutamic acid, cysteic acid, homocysteic acid and homoglutamic acid. In some embodiments the C-terminal amino acid of a class 5 peptide have an amide group substituting for the carboxylic acid group that is present on the native amino acid.

[1064] In some embodiments an amino acid of class 5 peptide is substituted with at least one cysteine residue, wherein the side chain of the cysteine residue is further modified with a thiol reactive reagent, including for example, maleimido, vinyl sulfone, 2-pyridylthio, haloalkyl, and haloacyl. These thiol reactive reagents may contain carboxy, keto, hydroxyl, and ether groups as well as other hydrophilic moieties such as polyethylene glycol units. In an alternative embodiment, an amino acid of a class 5 peptide is substituted with lysine, and the side chain of the substituting lysine residue is further modified using amine reactive reagents such as active esters (succinimido, anhydride, etc) of carboxylic acids or aldehydes of hydrophilic moieties such as polyethylene glycol. In accordance with some embodiments the lysine residue corresponding to position 7 of the peptide of SEQ ID NO: 1405 is substituted with arginine and a single lysine substitution is inserted for one of the amino acids corresponding to position 12, 15, 16, 19 and 24 of SEQ ID NO: 1405.

[1065] In another embodiment the methionine residue corresponding to position 22 of the class 5 peptides disclosed herein is changed to leucine or norleucine to prevent oxidative degradation of the peptide.

[1066] Moreover class 5 peptides, in some aspects, also encompass amino acid substitutions at positions that are known not to be critical to the function of the glucagon analog. In some embodiments the substitutions are conservative amino acid substitutions at one, two or three positions selected from the group consisting of 2, 5, 6, 7, 8, 9, 12, 13, 14, 15, 16, 19, 22, 23 or 24. In some embodiments the amino acids corresponding to positions 16, 17, 20, 21, 24 or 29 of the native glucagon peptide, and more particularly at position 21 and/or 24 relative to native glucagon are substituted with cysteine or lysine, wherein a PEG chain is covalently attached to the substituted cysteine or lysine residue.

[1067] In accordance with some embodiments, a class 5 peptide is provided comprising a sequence consisting of SEQ ID NO: 1409, further modified by one or more additional amino acid substitutions at positions corresponding to positions 11, 12, 15, 16, 19 and/or 24 of the peptide (including for example substitution with cysteine), wherein the amino acid substitution comprises an amino acid having a side chain suitable for crosslinking with hydrophilic moieties, including for example, PEG. Native glucagon can be substituted with a naturally occurring amino acid or a synthetic (non-naturally occurring) amino acid. Synthetic or non-naturally occurring amino acids refer to amino acids that do not naturally occur in vivo but which, nevertheless, can be incorporated into the peptide structures described herein. In some embodiments a Class 5 peptide is provided wherein the peptide comprises the sequence of SEQ ID NO: 1409 and further comprises a polyethylene glycol chain bound to position 16 or 19 of the peptide. In a further embodiment the C-terminus of the glucagon analog is modified to replace the carboxylic acid group with an amide group.

[1068] In accordance with some embodiments a class 5 peptide is provided comprising a glucagon analog selected from the group consisting of:

(SEQ ID NO: 1439)
R₁-Phe-Thr-Ser-Xaa-Tyr-Ser-Lys-Tyr-Leu-Xaa-Glu-
Arg-Arg-Ala-Gln-Asp-Phe-Val-Gln-Trp-Leu-Xaa-Asn-
Thr-R₂
(SEQ ID NO: 1413)
R₁-Phe-Thr-Ser-Xaa-Tyr-Ser-Lys-Tyr-Leu-Asp-Glu-
Arg-Arg-Ala-Gln-Xaa-Phe-Val-Gln-Trp-Leu-Xaa-Asn-
Thr-R₂,
(SEQ ID NO: 1414)
R₁-Phe-Thr-Ser-Xaa-Tyr-Ser-Lys-Tyr-Leu-Asp-Glu-
Arg-Arg-Ala-Gln-Asp-Phe-Val-Xaa-Trp-Leu-Xaa-Asn-
Thr-R₂
and
(SEQ ID NO: 1412)
R₁-Phe-Thr-Ser-Xaa-Tyr-Ser-Lys-Tyr-Leu-Asp-Glu-
Arg-Arg-Ala-Gln-Xaa-Phe-Val-Xaa-Trp-Leu-Xaa-Asn-
Thr-R₂,

wherein Xaa at position 4=aspartic acid, glutamic acid, cysteic acid or homocysteic acid, Xaa at position 10=Asp, Glu, cysteic acid, homoglutamic acid and homocysteic acid, Xaa at position 16 is Asp, Cys, Orn, homocysteine or acetyl phenylalanine and the Xaa at position 19 is Gln, Cys, Orn, homocysteine and acetyl phenylalanine, Xaa at position 22=Met, Leu or Nle, R₁ is OH or NH₂, and R₂ is Gly Pro Ser Ser Gly Ala Pro Pro Pro Ser (SEQ ID NO: 1421), Gly Pro Ser Ser Gly Ala Pro Pro Pro Ser Xaa (SEQ ID NO: 1450; wherein Xaa is Cys, Orn, homocystein or acetyl phenyalanine), COOH or CONH₂, wherein the peptide is optionally pegylated at position 16 of SEQ ID NO: 1413, position 19 of SEQ ID NO: 1414 and at positions 16 and 19 of SEQ ID NO: 1412. In some embodiments the Thr at position 24 of SEQ ID NOs: 1412-1414 and 1439 is substituted with Gly. In accordance with some embodiments the peptide comprises the sequence of SEQ ID NO: 13 or SEQ ID NO: 1414, wherein R₁ is OH. In accordance with some embodiments the peptide comprises the sequence of SEQ ID NO: 1413 or SEQ ID NO: 1414, wherein R₁ is OH and R₂ is CONH₂. In accordance with some embodiments the peptide comprises the sequence of SEQ ID NO: 1413 or SEQ ID NO: 1414, wherein R₁ is OH, R₂ is CONH₂ and the threonine at position 24 is substituted with glycine.

[1069] In some embodiments, a class 5 peptide is further modified to comprise one or more amino acids of native GLP-1 by substitution of the native glucagon residue(s) at corresponding amino acid positions. For example, the class 5 peptide may comprise one or more amino acid substitutions at any of positions 2, 3, 17, 18, 21, 23, and 24 (according to the amino acid numbering of native glucagon). In a specific embodiment, the class 5 peptide is modified by one or more of the following amino acid substitutions: Ser2 is replaced with Ala, Gln3 is replaced with Glu, Arg17 is replaced with Gln, Arg at position 18 is replaced with Ala, Asp at position 21 is replaced with Glu, Val at position 23 is replaced with Ile, and Gln at position 24 is replaced with Ala (amino acid positions are in accordance with the native glucagon sequence). In a specific embodiment, the class 5 peptide is modified by replacing Ser2 with Ala and Gln3 with Glu (according to the amino acid numbering of native glucagon). In another specific embodiment, the class 5 peptide is modified with all of the following amino acid substitutions: Arg17 is replaced with Gln, Arg at position 18 is replaced with Ala, Asp at position 21 is replaced with Glu, Val at position 23 is replaced with Ile, and Gln at position 24 is replaced with Ala (amino acid numbering according to native glucagon). In yet another specific embodiment, the class 5 peptide is modified to comprise just Glu at position 21 (according to the numbering of SEQ ID NO: 1401). Accordingly, the class 5 peptide can comprise the amino acid sequence of any of SEQ ID NOs: 1460-1470, 1473-1478, 1480-1488, 1490-1496, 1503, 1504, 1506, and 1514-1518.

[1070] Also provided herein is a class 5 peptide or conjugate thereof comprising (1) a stabilized alpha helix through means described herein (e.g., through an intramolecular bridge, or incorporation of one or more alpha, alpha-di-substituted amino acids, or an acidic amino acid at position 16 (according to the numbering of SEQ ID NO:1401), or a combination thereof; (2) a C-terminal amide or ester in place of a C-terminal carboxylate, and (3) a general structure of A-B-C,

[1071] wherein A is selected from the group consisting of
[1072] (i) phenyl lactic acid (PLA);
[1073] (ii) an oxy derivative of PLA; and
[1074] (iii) a peptide of 2 to 6 amino acids in which two consecutive amino acids of the peptide are linked via an ester or ether bond;

[1075] wherein B represents amino acids p to 26 of SEQ ID NO: 1401, wherein p is 3, 4, 5, 6, or 7, optionally comprising one or more amino acid modifications, as described herein, including, for example, any of the modifications described for Class 5 peptides. For instance the one or more modification may be selected from the group consisting of:
[1076] (iv) Asp at position 9 (according to the amino acid numbering of SEQ ID NO: 1401) is substituted with a Glu, a sulfonic acid derivative of Cys, homoglutamic acid, β-homoglutamic acid, or an alkylcarboxylate derivative of cysteine having the structure of:

[chemical structure]

[1077] wherein X₅ is C₁-C₄ alkyl, C₂-C₄ alkenyl, or C₂-C₄ alkynyl;
[1078] (v) substitution of one or two amino acids at positions 10, 20, and 24, (according to the amino acid numbering of SEQ ID NO: 1401) with an amino acid covalently attached to an acyl or alkyl group via an ester, ether, thioether, amide, or alkyl amine linkage;
[1079] (vi) substitution of one or two amino acids at positions 16, 17, 20, 21, and 24 (according to the amino acid numbering of SEQ ID NO: 1401) with an amino acid selected from the group consisting of: Cys, Lys, ornithine, homocysteine, and acetyl-phenylalanine (Ac-Phe), wherein the amino acid of the group is covalently attached to a hydrophilic moiety;
[1080] (vii) Asp at position 15 (according to the numbering of SEQ ID NO: 1401) is substituted with cysteic acid, glutamic acid, homoglutamic acid, and homocysteic acid;
[1081] (viii) Ser at position 16 (according to the numbering of SEQ ID NO: 1401) is substituted with cysteic acid, glutamic acid, homoglutamic acid, and homocysteic acid;
[1082] (ix) Arg at position 17 is replaced with Gln, Arg at position 18 is replaced with Ala, Asp at position 21 is replaced with Glu, Val at position 23 is replaced with Ile, and Gln at position 24 is replaced with Ala (according to amino acid numbering of SEQ ID NO: 1401);
[1083] (x) Ser at position 16 is replaced with Glu, Gln at position 20 is replaced with Glu, or Gln at position 24 is replaced with Glu(according to the amino acid numbering of SEQ ID NO: 1401);

[1084] wherein C (of the general structure of A-B-C) is selected from the group consisting of:
[1085] (vii) X;
[1086] (viii) X—Y;
[1087] (ix) X—Y—Z;
[1088] (x) X—Y—Z—R10;

[1089] wherein X is Met, Leu, or Nle; Y is Asn or a charged amino acid; Z is Thr, Gly, Cys, Lys, ornithine (Orn), homocysteine, acetyl phenylalanine (Ac-Phe), or a charged amino acid; wherein R10 is selected from a group consisting of SEQ ID NOs: 1421, 1426, 1427, and 1450.

[1090] In a specific aspect, the peptide comprises an oxy derivative of PLA. As used herein “oxy derivative of PLA” refers to a compound comprising a modified structure of PLA in which the hydroxyl group has been replaced with O—R₁₁, wherein R₁₁ is a chemical moiety. In this regard, the oxy derivative of PLA can be, for example, an ester of PLA or an ether of PLA.

[1091] Methods of making oxy derivatives of PLA are known in the art. For example, when the oxy derivative is an ester of PLA, the ester may be formed by upon reaction of the hydroxyl of PLA with a carbonyl bearing a nucleophile. The nucleophile can be any suitable nucleophile, including, but not limited to an amine or hydroxyl. Accordingly, the ester of PLA can comprise the structure of Formula IV:

[chemical structure]

[1092] wherein R7 is an ester formed upon reaction of the hydroxyl of PLA with a carbonyl bearing a nucleophile.

[1093] The carbonyl bearing a nucleophile (which reacts with the hydroxyl of PLA to form an ester) can be, for example, a carboxylic acid, a carboxylic acid derivative, or an activated ester of a carboxylic acid. The carboxylic acid derivative can be, but is not limited to, an acyl chloride, an acid anhydride, an amide, an ester, or a nitrile. The activated ester of a carboxylic acid can be, for example, N-hydroxysuccinimide (NHS), tosylate (Tos), a carbodiimide, or a hexafluorophosphate. In some embodiments, the carbodiimide is 1,3-dicyclohexylcarbodiimide (DCC), 1,1′-carbonyldiimidazole (CDI), 1-ethyl-3-(3-dimethylaminopropyl)carbodiimide hydrochloride (EDC), or 1,3-diisopropylcarbodiimide (DICD). In some embodiments, the hexafluorophosphate is selected from a group consisting of hexafluorophosphate benzotriazol-1-yl-oxy-tris(dimethylamino)phosphonium hexafluorophosphate (BOP), benzotriazol-1-yl-oxytripyrrolidinophosphonium hexafluorophosphate (PyBOP), 2-(1H-7-azabenzotriazol-1-yl)-1,1,3,3-tetramethyl uronium hexafluorophosphate (HATU), and o-benzotriazole-N,N,N′,N′-tetramethyl-uronium-hexafluoro-phosphate (HBTU).

[1094] Methods of making ethers from reaction with a hydroxyl group (e.g., the hydroxyl of PLA) also are known in the art. For example, the hydroxyl group of PLA may be reacted with a halogenated alkyl or tosylated alkyl alcohol to form an ether bond.

[1095] In a specific embodiment, the chemical moiety bound to PLA via an oxygen-containing bond (e.g., via an ester or ether bond) is a polymer (e.g., a polyalkylene glycol), a carbohydrate, an amino acid, a peptide, or a lipid, e.g., a fatty acid or a steroid.

[1096] In a specific embodiment, the chemical moiety is an amino acid, which, optionally, is a part of a peptide, such that Formula IV is a depsipeptide. In this regard, PLA may be at a position other than the N-terminal amino acid residue of the peptide, such that the peptide comprises one or more (e.g., 1, 2, 3, 4, 5, 6, or more) amino acids N-terminal to the PLA residue. For example, the peptide can comprise PLA at position n, wherein n is 2, 3, 4, 5, or 6 of the peptide.

[1097] The amino acids N-terminal to the PLA residue may be synthetic or naturally-occurring. In a specific embodiment, the amino acids which are N-terminal PLA are naturally-occurring amino acids. In some embodiments, the amino acids which are N-terminal to PLA are the N-terminal amino acids of native glucagon. For example, the peptide can comprise at the N-terminus the amino acid sequence of any of SEQ ID NOs: 1452-1456, wherein PLA is linked to threonine via an ester bond:

| | |
|---|---|
| His-Ser-Gln-Gly-Thr-PLA | SEQ ID NO: 1452 |
| Ser-Gln-Gly-Thr-PLA | SEQ ID NO: 1453 |
| Gln-Gly-Thr-PLA | SEQ ID NO: 1454 |
| Gly-Thr-PLA | SEQ ID NO: 1455 |
| Thr-PLA | SEQ ID NO: 1456 |

[1098] In an alternative embodiment, one or more of the N-terminal amino acids may be substituted with an amino acid other than the amino acid of native glucagon. For example, when the peptide comprises PLA as the amino acid at position 5 or 6, the amino acid at position 1 and/or position 2 may be an amino acid which reduces susceptibility to cleavage by dipeptidyl peptidase IV. More particularly, in some embodiments, position 1 of the peptide is an amino acid selected from the group consisting of D-histidine, alpha, alpha-dimethyl imidiazole acetic acid (DMIA), N-methyl histidine, alpha-methyl histidine, imidazole acetic acid, desaminohistidine, hydroxyl-histidine, acetyl-histidine and homo-histidine. More particularly, in some embodiments, position 2 of the antagonist/agonist peptide is an amino acid selected from the group consisting of D-serine, D-alanine, valine, glycine, N-methyl serine, N-methyl alanine, and aminoisobutyric acid (AIB). Also, for example, when the peptide comprises PLA as the amino acid at position 4, 5, or 6, the amino acid at position 3 of the peptide may be glutamic acid, as opposed to the native glutamine residue of native glucagon. In an exemplary embodiment of the invention, the peptide comprises at the N-terminus the amino acid sequence of any of SEQ ID NOs: 1457-1459.

[1099] With respect to the peptides comprising a compound of Formula IV, the polymer may be any polymer, provided that it can react with the hydroxyl group of PLA. The polymer may be one that naturally or normally comprises a carbonyl bearing a nucleophile. Alternatively, the polymer may be one which was derivatized to comprise the carbonyl bearing the carbonyl. The polymer may be a derivatized polymer of any of: polyamides, polycarbonates, polyalkylenes and derivatives thereof including, polyalkylene glycols, polyalkylene oxides, polyalkylene terepthalates, polymers of acrylic and methacrylic esters, including poly(methyl methacrylate), poly(ethyl methacrylate), poly(butylmethacrylate), poly(isobutyl methacrylate), poly(hexylmethacrylate), poly(isodecyl methacrylate), poly(lauryl methacrylate), poly(phenyl methacrylate), poly(methyl acrylate), poly(isopropyl acrylate), poly(isobutyl acrylate), and poly(octadecyl acrylate), polyvinyl polymers including polyvinyl alcohols, polyvinyl ethers, polyvinyl esters, polyvinyl halides, poly(vinyl acetate), and polyvinylpyrrolidone, polyglycolides, polysiloxanes, polyurethanes and co-polymers thereof, celluloses including alkyl cellulose, hydroxyalkyl celluloses, cellulose ethers, cellulose esters, nitro celluloses, methyl cellulose, ethyl cellulose, hydroxypropyl cellulose, hydroxy-propyl methyl cellulose, hydroxybutyl methyl cellulose, cellulose acetate, cellulose propionate, cellulose acetate butyrate, cellulose acetate phthalate, carboxylethyl cellulose, cellulose triacetate, and cellulose sulphate sodium salt, polypropylene, polyethylenes including poly(ethylene glycol), poly(ethylene oxide), and poly(ethylene terephthalate), and polystyrene.

[1100] The polymer can be a biodegradable polymer, including a synthetic biodegradable polymer (e.g., polymers of lactic acid and glycolic acid, polyanhydrides, poly(ortho)esters, polyurethanes, poly(butic acid), poly(valeric acid), and poly(lactide-cocaprolactone)), and a natural biodegradable polymer (e.g., alginate and other polysaccharides including dextran and cellulose, collagen, chemical derivatives thereof (substitutions, additions of chemical groups, for example, alkyl, alkylene, hydroxylations, oxidations, and other modifications routinely made by those skilled in the art), albumin and other hydrophilic proteins (e.g., zein and other prolamines and hydrophobic proteins)), as well as any copolymer or mixture thereof. In general, these materials degrade either by enzymatic hydrolysis or exposure to water in vivo, by surface or bulk erosion.

[1101] The polymer can be a bioadhesive polymer, such as a bioerodible hydrogel described by H. S. Sawhney, C. P. Pathak and J. A. Hubbell in Macromolecules, 1993, 26, 581-587, the teachings of which are incorporated herein, polyhyaluronic acids, casein, gelatin, glutin, polyanhydrides, polyacrylic acid, alginate, chitosan, poly(methyl methacrylates), poly(ethyl methacrylates), poly(butylmethacrylate), poly(isobutyl methacrylate), poly(hexylmethacrylate), poly(isodecyl methacrylate), poly(lauryl methacrylate), poly(phenyl methacrylate), poly(methyl acrylate), poly(isopropyl acrylate), poly(isobutyl acrylate), and poly(octadecyl acrylate).

[1102] In some embodiments, the polymer is a water-soluble polymer. Suitable water-soluble polymers are known in the art and include, for example, polyvinylpyrrolidone, hydroxypropyl cellulose (HPC; Klucel), hydroxypropyl methylcellulose (HPMC; Methocel), nitrocellulose, hydroxypropyl ethylcellulose, hydroxypropyl butylcellulose, hydroxypropyl pentylcellulose, methyl cellulose, ethylcellulose (Ethocel), hydroxyethyl cellulose, various alkyl celluloses and hydroxyalkyl celluloses, various cellulose ethers, cellulose acetate, carboxymethyl cellulose, sodium carboxymethyl cellulose, calcium carboxymethyl cellulose, vinyl acetate/crotonic acid copolymers, poly-hydroxyalkyl methacrylate, hydroxymethyl methacrylate, methacrylic acid copolymers, polymethacrylic acid, polymethylmethacrylate, maleic anhydride/methyl vinyl ether copolymers, poly vinyl alcohol, sodium and calcium polyacrylic acid, polyacrylic acid, acidic carboxy polymers, carboxypolymethylene, carboxyvinyl polymers, polyoxyethylene polyoxypropylene copolymer, polymethylvinylether co-maleic anhydride, carboxymethylamide, potassium methacrylate divinylbenzene co-polymer, polyoxyethyleneglycols, polyethylene oxide, and derivatives, salts, and combinations thereof.

[1103] In a specific embodiment, the polymer is a polyalkylene glycol, including, for example, polyethylene glycol (PEG).

[1104] The carbohydrate may be any carbohydrate provided that it comprises or is made to comprise a carbonyl with an alpha leaving group. The carbohydrate, for example, may be one which has been derivatized to comprise a carbonyl with an alpha leaving group. In this regard, the carbohydrate may be a derivatized form of a monosaccharide (e.g., glucose, galactose, fructose), a disaccharide (e.g., sucrose, lactose, maltose), an oligosaccharide (e.g., raffinose, stachyose), a polysaccharide (a starch, amylase, amylopectin, cellulose, chitin, callose, laminarin, xylan, mannan, fucoidan, galactomannan.

[1105] The lipid may be any lipid comprising a carbonyl with an alpha leaving group. The lipid, for example, may be one which is derivatized to comprise the carbonyl. In this regard, the lipid, may be a derivative of a fatty acid (e.g., a C4-C30 fatty acid, eicosanoid, prostaglandin, leukotriene, thromboxane, N-acyl ethanolamine), glycerolipid (e.g., mono-, di-, tri-substituted glycerols), glycerophospholipid (e.g., phosphatidylcholine, phosphatidylinositol, phosphatidylethanolamine, phosphatidylserine), sphingolipid (e.g., sphingosine, ceramide), sterol lipid (e.g., steroid, cholesterol), prenol lipid, saccharolipid, or a polyketide. oil, wax, cholesterol, sterol, fat-soluble vitamin, monoglyceride, diglyceride, triglyceride, a phospholipid.

[1106] In some embodiments, R7 has a molecular weight of about 100 kDa or less, e.g., about 90 kDa or less, about 80 kDa or less, about 70 kDa or less, about 60 kDa or less, about 50 kDa or less, about 40 kDa or less. Accordingly, R7 can have a molecular weight of about 35 kDa or less, about 30 kDa or less, about 25 kDa or less, about 20 kDa or less, about 15 kDa or less, about 10 kDa or less, about 5 kDa or less, or about 1 kDa.

[1107] In an alternative embodiment, the peptide comprising the general structure of A-B-C comprises, as A, a peptide of 2 to 6 amino acids in which two consecutive amino acids of the peptide of A are linked via an ester or ether bond. The ester or ether bond may be, e.g., between amino acids 2 and 3, 3 and 4, 4 and 5, or 5 and 6. Optionally the peptide of A may be further modified by covalent linkage to another chemical moiety including linkage to a polymer (e.g. a hydrophilic polymer), alkylation, or acylation.

[1108] In a specific embodiment, the above-described class 5 peptide comprising PLA is modified to comprise an oxy derivative of PLA, such as, for instance, an ester of PLA or an ether of PLA. For example, the class 5 peptide can comprise the amino acid sequence of any of SEQ ID NOs: 1402, 1405-1420, 1422-1425, 1432-1436, 1438, 1439, 1445, 1446, and 1451, wherein the PLA is linked via an ester or ether bond to an amino acid, peptide, polymer, acyl group, or alkyl group. The amino acid, peptide, polymer, acyl group, or alkyl group may be any of those described herein. In the case that the PLA is linked via an ester bond to an amino acid or peptide, the class 5 peptide may be considered as a depsipeptide.

[1109] Also, in another specific embodiment, the above-described class 5 peptide which lacks PLA is modified to comprise at least one ester bond or ether bond between two consecutive amino acids which are N-terminal to the amino acid at position 7 (according to the numbering of native glucagon). In a specific embodiment, the class 5 peptide comprises at least one ester or ether bond between the two consecutive amino acids. In a more specific embodiment, the Class 5 peptide comprises the N-terminal 6 amino acids of SEQ ID NO: 1401 and two consecutive amino acids of the N-terminal 6 amino acids are linked via an ester or ether bond.

[1110] The peptide of A may comprise any amino acids, synthetic or naturally occurring, provided that at least two consecutive amino acids are linked via an ester or ether bond. In a specific embodiment, the peptide of A comprises amino acids of native glucagon. The amino acid at position 1 and/or position 2 may be an amino acid which reduces susceptibility to cleavage by dipeptidyl peptidase IV. For instance, the peptide of A can comprise at position 1 an amino acid selected from the group consisting of D-histidine, alpha, alpha-dimethyl imidiazole acetic acid (DMIA), N-methyl histidine, alpha-methyl histidine, imidazole acetic acid, desaminohistidine, hydroxyl-histidine, acetyl-histidine and homo-histidine. More particularly, in some embodiments, position 2 of the peptide of A is an amino acid selected from the group consisting of D-serine, D-alanine, valine, glycine, N-methyl serine, N-methyl alanine, and aminoisobutyric acid (AIB). Also, for example, the amino acid at position 3 of the peptide of A may be glutamic acid, as opposed to the native glutamine residue of native glucagon. Accordingly, the peptide of general structure of A-B-C can comprise an amino acid sequence of:

| | |
|---|---|
| Xaa₁-Xaa₂-Xaa₃-Thr-Gly-Phe; | (SEQ ID NO: 1507) |
| Xaa₂-Xaa₃-Thr-Gly-Phe; | (SEQ ID NO: 1508) |
| or | |
| Xaa₃-Thr-Gly-Phe; | (SEQ ID NO: 1509) |

[1111] wherein Xaa₁ is selected from a group consisting of: His, D-histidine, alpha, alpha-dimethyl imidiazole acetic acid (DMIA), N-methyl histidine, alpha-methyl histidine, imidazole acetic acid, desaminohistidine, hydroxyl-histidine, acetyl-histidine and homo-histidine; Xaa₂ is selected from a group consisting of: Ser, D-serine, D-alanine, valine, glycine, N-methyl serine, N-methyl alanine, and aminoisobutyric acid (AIB); and Xaa₃ is Gln or Glu.

[1112] In some embodiments, B is modified by up to three amino acid modifications. For example, B, which represents native amino acid sequence of SEQ ID NO: 1401 is modified by one or more conservative amino acid modifications.

[1113] In another embodiment, B comprises one or more amino acid modifications selected from the group consisting of (iv) to (x), as described herein. In a specific embodiment, B comprises one or both of the amino acid modifications (v) and (vi). In a further specific embodiment, B comprises one or a combination of amino acid modifications selected from the group consisting of (iv), (vii), (viii), (ix), and (x), in addition to (v) and (vi).

[1114] As described herein, the peptide comprising the general structure A-B-C may comprise one or more charged amino acids at the C-terminus, e.g., as Y and/or Z, as described herein. Alternatively or additionally, the peptide comprising the general structure A-B-C may further comprise one to two charged amino acids C-terminal to Z, when C comprises X—Y—Z. The charged amino acids can be, for example, one of Lys, Arg, His, Asp, and Glu. In a specific embodiment, Y is Asp.

[1115] In some embodiments, the peptide comprising the general structure A-B-C comprises a hydrophilic moiety covalently bound to an amino acid residue at position 1, 16, 20, 21, or 24 (according to the amino acid numbering of SEQ ID NO: 1401), or at the N- or C-terminal residue of the peptide comprising the general structure A-B-C. In a specific embodiment, the hydrophilic moiety is attached to a Cys residue of the peptide comprising the general structure A-B-C. In this regard, the amino acid at position 16, 21, 24, or 29 of native glucagon (SEQ ID NO: 1401) may be substituted with a Cys residue. Alternatively, a Cys residue comprising a hydrophilic moiety may be added to the C-terminus of the peptide comprising the general structure A-B-C as position 30 or as position 40, e.g., when the peptide comprising the general structure A-B-C comprises a C-terminal extension (positions according to the amino acid numbering of SEQ ID NO: 1401). Alternatively, the hydrophilic moiety may be attached to the PLA of the peptide comprising the general structure A-B-C via the hydroxyl moiety of PLA. The hydrophilic moiety can be any of those described herein, including, for example, polyethylene glycol.

[1116] In a specific aspect, the peptide comprising the general structure A-B-C comprises a stabilized alpha helix by virtue of incorporation of an intramolecular bridge. In some embodiments, the intramolecular bridge is a lactam bridge. The lactam bridge may be between the amino acids at positions 9 and 12, the amino acids at positions 12 and 16, the amino acids at positions 16 and 20, the amino acids at positions 20 and 24, or the amino acids at positions 24 and 28 (according to the amino acid numbering of SEQ ID NO: 1401). In a specific embodiment, the amino acids at positions 12 and 16 or at positions 16 and 20 (according to the amino acid numbering of SEQ ID NO: 1401) are linked via a lactam bridge. Other positions of the lactam bridge are contemplated.

[1117] Additionally or alternatively, the peptide comprising the general structure A-B-C can comprise an alpha, alpha di-substituted amino acid at, for example, any of positions 16, 20, 21, or 24 (according to the amino acid numbering of SEQ ID NO: 1401). In some embodiments, the alpha, alpha di-substituted amino acid is AIB. In a specific aspect, the AIB is located at position 16 (according to the numbering of SEQ ID NO: 1401).

[1118] Alternatively or additionally, the peptide comprising the general structure A-B-C may be modified to comprise an acidic amino acid at position 16 (according to the numbering of SEQ ID NO: 1401), which modification enhances the stability of the alpha helix. The acidic amino acid, in some embodiments, is an amino acid comprising a side chain sulfonic acid or a side chain carboxylic acid. In a more specific embodiment, the acidic amino acid is selected from the group consisting of Glu, Asp, homoglutamic acid, a sulfonic acid derivative of Cys, cysteic acid, homocysteic acid, Asp, and an alkylated derivative of Cys having the structure of

[chemical structure]

[1119] wherein X₅ is C₁-C₄ alkyl, C₂-C₄ alkenyl, or C₂-C₄ alkynyl.

[1120] In a specific embodiment, the Class 5 peptide may comprise the amino acid sequence of any of SEQ ID NOs: 1460-1470, 1473-1478, 1480-1488, 1490-1496, 1503, 1504, 1506, and 1514-1518, or comprising the amino acid sequence of any of Peptides 2-6 of Table 13, Peptides 1-8 of Table 14, and Peptides 2-6, 8, and 9 of Table 15.

TABLE 13
Lactam, Cex glucagon(6-39) peptides and glucagon
antagonist and GLP-1 agonist activity

| | | | GLP-1 EC₅₀ | Glu IC₅₀ |
|---|---|---|---|---|
| | | | (nM) | (nM) |
| 1 | E9, K12, E16 | FTSEYSKYLDERRAQDFVQWLMNTGPSSGAPPPS | 1451 | 762 |
| 2 | E9, K12E16(lactam) | FTSEYSKYLDERRAQDFVQWLMNTGPSSGAPPPS | 63 | 2008 |
| 3 | E9, E16K20(lactam) | FTSEYSKYLDERRAKDFVQWLMNTGPSSGAPPPS | 36 | 42 |
| 4 | D9, K12E16(Lactam) | FTSDYSKYLDERRAQDFVQWLMNTGPSSGAPPPS | 118.7 | 828 |
| 5 | [PLA6, E9, K12E16(Lactam) | PLA-TSEYSKYLDERRAQDFVQWLMNTGPSSGAPPPS | 6 | 72 |
| 6 | [PLA6, E9, E16K20(Lactam)] | PLA-TSEYSKYLDERRAKDFVQWLMNTGPSSGAPPPS | 20 | 20 |

TABLE 14
Lactam glucagon (1-29, 2-29, 4-29 and 6-29)
peptides and their glucagon antagonist and
GLP-1 agonist activity

| | | GLP-1 | Glucagon |
|---|---|---|---|
| | | EC50 | IC50 |
| | | (nM) | (nM) |
| | Glucagon | | 0.2~1.0* |
| | HSQGTFTSDYSKYLDSRRAQDFVQWLMNT | | |
| | GLP-1 (aa 1-30) | 0.02~0.1 | |
| | HAEGTFTSDVSSYLEGQAAKEFIAWIVKGR | | |
| 1 | [PLA6, D9, E16K20(lactam), | 5~25 | 10~30 |
| | D28]G(6-29) | | |
| | PLA TSDYSKYLDERRAKDFVQWLMDT | | |
| 2 | [PLA6, D9, K12E16(Lactam), | 177 | 63 |
| | D28]G(6-29) | | |
| | PLA TSDYSKYLDERRAQDFVQWLMDT | | |
| 3 | [PLA6, D9, E16, K20E24(Lactam), | 239 | 74 |
| | D28]G(6-29) | | |
| | PLA TSDYSKYLDERRAKDFVEWLMDT | | |
| 4 | [PLA6, D9, E16, E24K28(lactam)] | 289 | 22 |
| | G(6~29) | | |
| | PLA TSDYSKYLDERRAQDFVEWLMKT | | |
| 5 | [E9, E16K20(lactam), D28]G(4~29) | 151 | 10~30 |
| | GTFTSEYSKYLDERRAKDFVQWLMDT | | |
| 6 | [E9, E16K20(lactam), D28]G(2~29) | 203 | 49 (PA) |
| | SQGTFTSEYSKYLDERRAKDFVQWLMDT | | |
| 7 | [A2E3, E16K20(Lactam), | 175 | 63 |
| | D28]G(2~29) | | |
| | AEGTFTSEYSKYLDERRAKDFVQWLMDT | | |
| 8 | [A2E3, E16K20(Lactam), | 0.2 | 130 (PA) |
| | D28]G(1~29) | | |
| | HAEGTFTSEYSKYLDERRAKDFVQWLMDT | | |
| 9 | ANK2 (Bayer peptide) | 0.28 | agonist |
| | HSQGTFTSDY ARYLDARRAREFIKWL VRGRG | | |

(PA = partial antagonist)
*EC50 at glucagon receptor

TABLE 15
Profile of Mixed Agonist/Antagonist
Glucagon (6-CEX) Analogs

| | | | | |
|---|---|---|---|---|
| 1 | E9, K12, E16 | FTSEYSKYLDERRAQDFVQWLMNTGPSSGAPPPS | 1451 | 762 |
| 2 | E9, K12E16(lactam) | FTSEYSKYLDERRAQDFVQWLMNTGPSSGAPPPS | 63 | 2008 |
| 3 | E9, E16K20(lactam) | FTSEYSKYLDERRAKDFVQWLMNTGPSSGAPPPS | 36 | 42 |
| 4 | D9, K12E20(lactam) | FTSDYSKYLDERRAQDFVQWLIMNTGPSSGAPPPS | 18 | 828 |
| 5 | [PLA6, E9, K12E20(lactam) | PLA-TSEYSKYLDERRAQDFVQWLMNTGPSSGAPPPS | 6 | 72 |
| 6 | [PLA6, E9, E16K20(Lactam) | PLA-TSEYSKYLDERRAKDFVQWLMNTGPSSGAPPPS | 20 | 20 |

Glucagon D⁹(6-29) analogs

| | | | GLP-1 | Glucagon |
|---|---|---|---|---|
| | | | EC50 | IC50 |
| | | | (nM) | (nM) |
| 7 | PLA6, D9, D28 | PLA-TSDYSKYLDSRRAQDFVQWLMDT | −700 | tbd |
| 8 | PLA6, D9, K12E20(Lactam) | PLA-TSDYSKYLDERRAQDFVQWLMDT | 21 | 13 |
| 9 | PLA6, D9, E16K20(lactam) | PLA-TSDYSKYLDERRAKDFVQWLMDT | 4 | 6 |

[1121] In some embodiments, the peptide comprising the general structure A-B-C is a Class 5 peptide. In a specific embodiment, the peptide exhibits at least about 50% of the maximum agonism achieved by native GLP-1 at the GLP-1 receptor and at least about 50% inhibition of the maximum response achieved by native glucagon at the glucagon receptor. In another specific embodiment, the peptide exhibits at least about 55%, at least about 60%, at least about 70%, at least about 80%, at least about 90%, at least about 95%, or about 100% of the maximum agonism achieved by native GLP-1 at the GLP-1 receptor. Alternatively or additionally, the peptide may exhibit at least about 55%, at least about 60%, at least about 70%, at least about 80%, at least about 90%, at least about 95%, or about 100% inhibition of the maximum response achieved by native glucagon at the glucagon receptor.

[1122] In some embodiments, a peptide with Class 5 peptide or conjugate thereof, is provided comprising:
[1123] (1) modifications that confer glucagon antagonist activity, including but not limited to:
   [1124] (a) substitution of the Phe at position 6 with PLA (according to amino acid numbering of wild type glucagon), optionally with deletion of 1 to 5 amino acids from the N-terminus of wild type glucagon; or
   [1125] (b) deletion of 2 to 5 amino acids from the N-terminus of wild type glucagon; optionally with substitution of Asp at position 9 of wild type glucagon with glutamic acid, homoglutamic acid or a sulfonic acid derivative of cysteine (according to amino acid numbering of wild type glucagon);
      and
[1126] (2) modifications that confer GLP-1 agonist activity, including but not limited to:
   [1127] (a) insertion or substitution of α,α-disubstituted amino acid within amino acids 12-29 of wild type glucagon, e.g. at one, two, three, four or more of positions 16, 17, 18, 19, 20, 21, 24 or 29 (according to the amino acid numbering of wild type glucagon); or
   [1128] (b) introduction of an intramolecular bridge within amino acids 12-29 of wild type glucagon, e.g. a salt bridge or a lactam bridge or another type of covalent bond; or
   [1129] (c) substitution of the amino acid at one or more of positions 2, 3, 17, 18, 21, 23, or 24 (according to the amino acid numbering of native glucagon) with the corresponding amino acid of GLP-1, e.g. Ser2 is replaced with Ala, Gln3 is replaced with Glu, Arg17 is replaced with Gln, Arg at position 18 is replaced with Ala, Asp at position 21 is replaced with Glu, Val at position 23 is replaced with Ile, and/or Gln at position 24 is replaced with Ala; or
   [1130] (d) other modifications that stabilize the alpha-helix structure around amino acid positions 12-29 according to the amino acid numbering of wild type glucagon;
      and
[1131] (3) other modifications that enhance GLP-1 agonist activity, e.g.
   [1132] (a) a C-terminal amide or ester in place of a C-terminal carboxylate;
      and optionally
[1133] (4) one or more of the following modifications:
   [1134] (a) covalent attachment to a hydrophilic moiety, such as polyethylene glycol, e.g. at the N-terminus, or at position 6, 16, 17, 20, 21, 24, 29, 40 or at the C-terminal amino acid; and/or
   [1135] (b) acylation or alkylation; and optionally
[1136] (5) one or more of the following additional modifications:
   [1137] (a) covalent linkage of amino acids, to the N-terminus, e.g. 1-5 amino acids to the N-terminus, optionally via an ester bond to PLA at position 6 (according to the numbering of wild type glucagon), optionally together with modifications at position 1 or 2, e.g. as described herein, that improve resistance to DPP-IV cleavage;
   [1138] (b) deletion of amino acids at positions 29 and/or 28, and optionally position 27 (according to the numbering of wild type glucagon);
   [1139] (c) covalent linkage of amino acids to the C-terminus;
   [1140] (d) non-conservative substitutions, conservative substitutions, additions or deletions while retaining desired activity, for example, conservative substitutions at one or more of positions 2, 5, 7, 10, 11, 12, 13, 14, 16, 17, 18, 19, 20, 21, 24, 27, 28 or 29, substitution of Tyr at position 10 with Val or Phe, substitution of Lys at position 12 with Arg, substitution of one or more of these positions with Ala;
   [1141] (e) modification of the aspartic acid at position 15, for example, by substitution with glutamic acid, homoglutamic acid, cysteic acid or homocysteic acid, which may reduce degradation; or modification of the serine at position 16, for example, by substitution of threonine, AIB, glutamic acid or with another negatively charged amino acid having a side chain with a length of 4 atoms, or alternatively with any one of glutamine, homoglutamic acid, or homocysteic acid, which likewise may reduce degradation due to cleavage of the Asp15-Ser16 bond;
   [1142] (f) modification of the methionine at position 27, for example, by substitution with leucine or norleucine, to reduce oxidative degradation;
   [1143] (g) modification of the Gln at position 20 or 24, e.g. by substitution with Ala or AIB, to reduce degradation that occurs through deamidation of Gln
   [1144] (h) modification of Asp at position 21, e.g. by substitution with Glu, to reduce degradation that occurs through dehydration of Asp to form a cyclic succinimide intermediate followed by isomerization to iso-aspartate;
   [1145] (j) homodimerization or heterodimerization as described herein; and
   [1146] (k) combinations of the above.

[1147] It is understood that any of the modifications within the same class may be combined together and/or modifications of different classes are combined. For example, the modifications of (1)(a) may be combined with (2)(a) and (3); (1)(a) may be combined with (2)(b), e.g. lactam bridge or salt bridge, and (3); (1)(a) may be combined with (2)(c) and (3); (1)(b) may be combined with (2)(a) and (3); (1)(b) may be combined with (2)(b), e.g. lactam bridge or salt bridge, and (3); (1)(b) may be combined with (2)(c) and (3); any of the foregoing may be combined with (4)(a) and/or (4)(b); and any of the foregoing may be combined with any of (5)(a) through (5)(k).

[1148] In exemplary embodiments, the α,α-disubstituted amino acid AIB is substituted at one, two, three or all of positions 16, 20, 21, or 24 (according to the amino acid numbering of wild type glucagon).

[1149] In exemplary embodiments, the intramolecular bridge is a salt bridge.

[1150] In other exemplary embodiments, the intramolecular bridge is a covalent bond, e.g. a lactam bridge. In some embodiments, the lactam bridge is between the amino acids at positions 9 and 12, the amino acids at positions 12 and 16, the amino acids at positions 16 and 20, the amino acids at positions 20 and 24, or the amino acids at positions 24 and 28 (according to the amino acid numbering of SEQ ID NO: 1401). In exemplary embodiments, acylation or alkylation is at position 6, 10, 20 or 24 or the N-terminus or C-terminus (according to the amino acid numbering of wild type glucagon) SEQ ID NO: 1401).

[1151] In exemplary embodiments, modifications include:
[1152] (i) substitution of Asp at position 15 (according to the numbering of SEQ ID NO: 1401) with cysteic acid, glutamic acid, homoglutamic acid, and homocysteic acid;
[1153] (ii) substitution of Ser at position 16 (according to the numbering of SEQ ID NO: 1401) with cysteic acid, glutamic acid, homoglutamic acid, and homocysteic acid;
[1154] (iii) substitution of Asn at position 28 with a charged amino acid;
[1155] (iv) substitution of Asn at position 28 with a charged amino acid selected from the group consisting of Lys, Arg, His, Asp, Glu, cysteic acid, and homocysteic acid;
[1156] (v) substitution at position 28 with Asn, Asp, or Glu;
[1157] (vi) substitution at position 28 with Asp;
[1158] (vii) substitution at position 28 with Glu;
[1159] (viii) substitution of Thr at position 29 with a charged amino acid;
[1160] (ix) substitution of Thr at position 29 with a charged amino acid selected from the group consisting of Lys, Arg, His, Asp, Glu, cysteic acid, and homocysteic acid;
[1161] (x) substitution at position 29 with Asp, Glu, or Lys;
[1162] (xi) substitution at position 29 with Glu;
[1163] (xii) insertion of 1-3 charged amino acids after position 29;
[1164] (xiii) insertion after position 29 of Glu or Lys;
[1165] (xiv) insertion after position 29 of Gly-Lys or Lys-Lys;
[1166] or combinations thereof.

[1167] Any of the modifications described above which increase GLP-1 receptor agonist activity, glucagon receptor antagonist activity, peptide solubility, and/or peptide stability can be applied individually or in combination.

[1168] Modification to Enhance Stability

[1169] In accordance with some embodiments the Class 5 peptides disclosed herein can be further modified to include the amino acid sequence of SEQ ID NO: 1421 (GPSSGAPPPS), or SEQ ID NO: 1450, linked to the carboxy terminal amino acid (position 24) of the Class 5 peptide and administered to individuals to induce weight loss or assist in weight maintenance. More particularly, the Class 5 peptide comprises a sequence selected from the group consisting of SEQ ID NO: 1405, SEQ ID NO: 1406, SEQ ID NO: 1407, SEQ ID NO: 1408, SEQ ID NO: 1409, SEQ ID NO: 1412, SEQ ID NO: 1413, SEQ ID NO: 1414, SEQ ID NO: 1416, SEQ ID NO: 1417, SEQ ID NO: 1418, SEQ ID NO: 1419, SEQ ID NO: 1422, SEQ ID NO: 1423, SEQ ID NO: 1424 and SEQ ID NO: 1425 and further comprising the amino acid sequence of SEQ ID NO: 1421 (GPSSGAPPPS), or SEQ ID NO: 1450, linked to the carboxy terminal amino acid (position 24) of the peptide or Class 5 peptide, is used to suppress appetite and inducing weight loss/weight maintenance. In some embodiments the administered peptide or Class 5 peptide comprises a sequence selected from the group consisting of SEQ ID NO: 1416, SEQ ID NO: 1417, SEQ ID NO: 1418 and SEQ ID NO: 1419, further comprising the amino acid sequence of SEQ ID NO: 1421 (GPSSGAPPPS) linked to the carboxy terminal amino acid (position 24) of the Class peptide. In some embodiments the method comprises administering a peptide or Class 5 peptide comprising the sequence of SEQ ID NO: 1445 or SEQ ID NO: 1446.

[1170] Accordingly, it is expected that the Class 5 peptides disclosed herein can be similarly modified to decrease their susceptibility to premature chemical cleavage in aqueous buffers. In accordance with some embodiments the Class 5 peptides described herein can be further modified to enhance their stability in aqueous solutions by replacing the native aspartic amino acid, located at corresponding position 15 of native glucagon, with an amino acid selected from the group consisting of cysteic acid, glutamic acid, homoglutamic acid and homocysteic acid. In accordance with some embodiments the aspartic acid residue at position 10 of class 5 peptide of SEQ ID NO: 1405, SEQ ID NO: 1406, SEQ ID NO: 1407 or SEQ ID NO: 1408 can be substituted with an amino acid selected from the group consisting of cysteic acid, glutamic acid, homoglutamic acid and homocysteic acid, and in some embodiments the native aspartic acid at position 10 of SEQ ID NO: 1405, SEQ ID NO: 1406, SEQ ID NO: 1407 or SEQ ID NO: 1408 is replaced with glutamic acid. In accordance with some embodiments a class 5 peptide having improved stability in aqueous solutions is provided wherein the antagonist comprises a modified sequence of SEQ ID NO: 1409, wherein the modification comprises substitution of the Asp at position 10 of SEQ ID NO: 1409 with Glu. In some embodiments a class 5 peptide is provided comprising a sequence selected form the group consisting of SEQ ID NO: 1422, SEQ ID NO: 1423, SEQ ID NO: 1424 and SEQ ID NO: 1425. In some embodiments the class 5 peptide is amidated.

[1171] The Asp-Ser sequence at position 15-16 of native glucagon has been identified as a uniquely unstable dipeptide that leads to premature chemical cleavage of the native hormone in aqueous buffers. For example, when maintained at 0.01N HCl at 37° C. for 2 weeks, more than 50% of the native glucagon may be cleaved into fragments. The two liberated cleavage peptides 1-15 and 16-29 are devoid of glucagon-like biological activity and thus represent a limitation on the aqueous pre-formulation of glucagon and its related analogs. The selective chemical substitution of the Asp at position 15 of native glucagon with Glu has been observed to virtually eliminate chemical cleavage of the 15-16 peptide bond.

[1172] In yet further exemplary embodiments, any of the foregoing compounds can be further modified to improve stability by modifying the amino acid corresponding to position 15 or 16 of native glucagon, to reduce degradation of the peptide over time, especially in acidic or alkaline buffers.

[1173] Modification to Enhance Solubility

[1174] The class 5 peptide can be further modified to improve the peptide's solubility in aqueous solutions at physiological pH, in certain aspects, while retaining the glucagon antagonist and GLP-1 agonist activity. Introduction of hydrophilic groups at positions corresponding to positions 12, 15, 16, 19 and 24 of the peptide of SEQ ID NO: 1405, or at positions 12, 16, 19 or 24 of the peptide of SEQ ID NO: 1406 can improve the solubility of the resulting peptides in solutions having a physiological pH, while retaining the parent compounds glucagon antagonist and GLP agonist activity. Therefore, in some embodiments the presently disclosed class 5 peptide that are further modified to comprise one or more hydrophilic groups covalently linked to the side chains of amino acids corresponding to amino acid positions 12, 15, 16, 19 and 24 of the peptide of SEQ ID NO: 1405 or SEQ ID NO: 1406. In a further embodiment the side chains of amino acids corresponding to amino acid positions 16 and 19 of SEQ ID NO: 1405 or SEQ ID NO: 1406 are covalently bound to hydrophilic groups, and in some embodiments the hydrophilic group is polyethylene glycol (PEG).

[1175] Class 5 glucagon related peptides can be modified by introducing charge at its carboxy terminus to enhance the solubility of the peptide while retaining the agonist properties of the peptide. The enhanced solubility allows for the preparation and storage of glucagon solutions at near neutral pH. Formulating glucagon solutions at relatively neutral pHs (e.g. pH of about 6.0 to about 8.0) improves the long term stability of the Class 5 peptides.

[1176] Applicants anticipate that class 5 peptides disclosed herein can be similarly modified to enhance their solubility in aqueous solutions at relatively neutral pH (e.g. pH of about 6.0 to about 8.0), in some cases, while retaining a glucagon antagonist and GLP-1 activity. Accordingly, some embodiments is directed to a glucagon antagonist/GLP-1 of SEQ ID NO: 1405, SEQ ID NO: 1406, SEQ ID NO: 1407 or SEQ ID NO: 1408 that has been further modified relative to the native amino acids present at positions 6-29 of the wild type glucagon (SEQ ID NO: 1401) to add charge to the peptide by the substitution of native non-charged amino acids with charged amino acids, or the addition of charged amino acids to the carboxy terminus. In accordance with some embodiments, one to three of the non-charged native amino acids of the class 5 peptides disclosed herein are replaced with a charged amino acid. In some embodiments the charged amino acid is selected from the group consisting of lysine, arginine, histidine, aspartic acid and glutamic acid. More particularly, applicants have discovered that substituting the normally occurring amino acid corresponding to position 28 and/or 29 (relative to native glucagon) with charged amino acids, and/or the addition of one to two charged amino acids at the carboxy terminus of the peptide, enhances the solubility and stability of the Class 5 peptide in aqueous solutions at physiologically relevant pHs (i.e., a pH of about 6.5 to about 7.5). Accordingly such modifications of class 5 peptides are anticipated to have a similar effect on the solubility in aqueous solutions, particularly at a pH ranging from about 5.5 to about 8.0, while retaining the parent peptide's biological activity

[1177] In accordance with some embodiments the class 5 peptide of SEQ ID NO: 1405, SEQ ID NO: 1406, SEQ ID NO: 1407 or SEQ ID NO: 1408 is modified by the substitution of the native amino acid at position 23 and/or 24 of those sequences with a negatively charged amino acid (e.g., aspartic acid or glutamic acid) and optionally the addition of a negatively charged amino acid (e.g., aspartic acid or glutamic acid) to the carboxy terminus of the peptide. In an alternative embodiment a class 5 peptide comprising SEQ ID NO: 1405, SEQ ID NO: 1406, SEQ ID NO: 1407 or SEQ ID NO: 1408 is modified by the substitution of the native amino acid at position 24 of SEQ ID NO: 1405, SEQ ID NO: 1406, SEQ ID NO: 1407 or SEQ ID NO: 1408 with a positively charged amino acid (e.g., lysine, arginine or histidine) and optionally the addition of one or two positively charged amino acid (e.g., lysine, arginine or histidine) on the carboxy terminus of the peptide. In accordance with some embodiments a class 5 peptide having improved solubility and stability is provided wherein the analog comprises the amino acid sequence of SEQ ID NO: 1415 or SEQ ID NO: 1451 with the proviso that at least one amino acids at position, 23, or 24 of SEQ ID NO: 1415 or SEQ ID NO: 1451 is substituted with an acidic amino acid and/or an additional acidic amino acid added at the carboxy terminus of SEQ ID NO: 1415 or SEQ ID NO: 1451. In some embodiments the acidic amino acids are independently selected from the group consisting of Asp, Glu, cysteic acid and homocysteic acid.

[1178] In accordance with some embodiments a class 5 peptide having improved solubility and stability is provided wherein the antagonist comprises the amino acid sequence of SEQ ID NO: 1416, SEQ ID NO: 1417, SEQ ID NO: 1418 or SEQ ID NO: 1419. In accordance with some embodiments a glucagon agonist is provided comprising the sequence of SEQ ID NO: 1416 or SEQ ID NO: 1417. In some embodiments the class 5 peptide comprises the sequence of SEQ ID NO: 1420.

[1179] In accordance with some embodiments a class 5 peptide is provided comprising the sequence of SEQ ID NO: 1415 or SEQ ID NO: 1451. In some embodiments, position 4 of SEQ ID NO: 1415 or SEQ ID NO: 1451 is aspartic acid, glutamic acid, homoglutamic acid, cysteic acid or homocysteic acid, and in some embodiments position 4 is aspartic acid, glutamic acid, cysteic acid or homocysteic acid, and in a further embodiment position 4 of SEQ ID NO: 1415 or SEQ ID NO: 1451 is aspartic acid or glutamic acid, and in some embodiments position 4 of SEQ ID NO: 1415 or SEQ ID NO: 1451 is aspartic acid. In some embodiments a class 5 peptide is provided comprising the sequence of SEQ ID NO: 1415 or SEQ ID NO: 1451 wherein position 4 of SEQ ID NO: 1415 is aspartic acid and position 10 of SEQ ID NO: 1415 is glutamic acid. In a further embodiment the C-terminal amino acid of SEQ ID NO: 1415 or SEQ ID NO: 1451 is modified to replace the native carboxylic acid group with a charge-neutral group, such as an amide or ester.

[1180] Class 5 Peptide Fusions

[1181] In a further embodiment, the carboxy terminal amino acid of the Class 5 peptide described herein is covalently bound to a second peptide comprising a sequence selected from the group consisting of SEQ ID NOs: 1421, 1426, 1427, and 1450. For example, in some embodiments, the Class 5 peptide of SEQ ID NO: 1415, SEQ ID NO: 1451, SEQ ID NO: 1405, SEQ ID NO: 1406, SEQ ID NO: 1407, SEQ ID NO: 1408, SEQ ID NO: 1412, SEQ ID NO: 1413, SEQ ID NO: 1414, SEQ ID NO: 1416, SEQ ID NO: 1417, SEQ ID NO: 1418, SEQ ID NO: 1419, SEQ ID NO: 1422, SEQ ID NO: 1423, SEQ ID NO: 1424 and SEQ ID NO: 1425 is covalently bound to a second peptide comprising a sequence selected from the group consisting of SEQ ID NO: 1421 (GPSSGAPPPS), SEQ ID NO: 1426 (KRNRNNIA), SEQ ID NO: 1427 (KRNR) and SEQ ID NO: 1450 (GPSSGAPPPSX).

[1182] In some embodiments a class 5 peptide dimer is provided comprising two sequences independently selected from the group consisting of SEQ ID NO: 1405, SEQ ID NO: 1406, SEQ ID NO: 1407, SEQ ID NO: 1408, SEQ ID NO: 1409, SEQ ID NO: 1422, SEQ ID NO: 1423, SEQ ID NO: 1424 and SEQ ID NO: 1425 that further comprises an amino acid sequence of SEQ ID NO: 1421 (GPSSGAPPPS) linked to the carboxy terminal amino acid of the class 5 peptide.

[1183] In some embodiments, the class 5 peptide is further modified by truncation or deletion of one or two amino acids of the C-terminus of the peptide (i.e., truncation of the amino acid at position 29 or at positions 28 and 29 of native glucagon). Preferably truncation does not effect activity (e.g., glucagon antagonism/GLP-1 agonism) of a class 5 peptide.

[1184] Class 5 Peptide Conjugates

[1185] Conjugates of Class 5 peptides are also provided, in which the glucagon peptide is linked, optionally via covalent bonding and optionally via a linker, to a conjugate moiety.

[1186] In those embodiments wherein the class 5 peptide comprises a polyethylene glycol chain, the polyethylene glycol chain may be in the form of a straight chain or it may be branched. In accordance with some embodiments the polyethylene glycol chain has an average molecular weight selected from the range of about 500 to about 10,000 Daltons. In some embodiments the polyethylene glycol chain has an average molecular weight selected from the range of about 1,000 to about 5,000 Daltons. In some embodiments the polyethylene glycol chain has an average molecular weight selected from the range of about 1,000 to about 5,000 Daltons. In some embodiments the polyethylene glycol chain has an average molecular weight selected of about 1,000 to about 2,000 Daltons. In some embodiments the polyethylene glycol chain has an average molecular weight of about 1,000 Daltons.

[1187] In some embodiments the pegylated class 5 peptide comprises a peptide consisting of the sequence of SEQ ID NO: 1415 or SEQ ID NO: 1451 wherein the polyethylene glycol chain is linked to an amino acid selected from positions 11, 12, 15, 16, 19 and 24 of SEQ ID NO: 1415 or SEQ ID NO: 1451, and the molecular weight of the PEG chain is about 1,000 to about 5,000 Daltons. In some embodiments the pegylated class 5 peptide comprises a peptide consisting of the sequence of SEQ ID NO: 1415 or SEQ ID NO: 1451 wherein the polyethylene glycol chain is linked to the amino acid at position 16 or 19 of SEQ ID NO: 1415 or SEQ ID NO: 1451, and the molecular weight of the PEG chain is about 1,000 to about 5,000 Daltons. In a further embodiment the modified class 5 peptide comprises two or more polyethylene glycol chains covalently bound to the peptide wherein the total molecular weight of the glucagon chains is about 1,000 to about 5,000 Daltons. In some embodiments the class 5 peptide comprises the sequence of SEQ ID NO: 1415 or SEQ ID NO: 1451 wherein a polyethylene glycol chain is linked to the amino acid at positions 16 and 19 of SEQ ID NO: 1415 or SEQ ID NO: 1451 and the combined molecular weight of the two PEG chains is about 1,000 to about 5,000 Daltons.

[1188] The class 5 glucagon related peptide may comprise the amino acid sequence of any of SEQ ID NOs: 1401-1518, optionally with up to 1, 2, 3, 4, or 5 further modifications that retain glucagon antagonist and GLP-1 agonist activity.

### Methods of Use

### Glucagon Superfamily Peptides

[1189] In general, prodrugs comprising a glucagon superfamily peptide or a glucagon related peptide, such as a Class 1, 2, 3, 4 or 5 peptide may be used for any purpose for which glucagon superfamily peptides and glucagon related peptides have been used (see for example as detailed above). For example, the disclosed bioactive peptide prodrug analogs are believed to be suitable for any use that has previously been described for its corresponding parent bioactive peptide. Accordingly, the glucagon related peptide prodrug analogs described herein can be used to treat hypoglycemia, hyperglycemia, diabetes, or other metabolic diseases that result from high/low blood levels of glucagon or high/low blood glucose levels. In accordance with some embodiments the patient to be treated using the prodrug disclosed herein is a domesticated animal, and in another embodiment the patient to be treated is a human.

[1190] In some embodiments, the prodrugs are used to reduce or suppress appetite, reduce food intake, induce weight loss, or assist in weight maintenance. Such methods for reducing appetite or promoting loss of body weight are expected to be useful in reducing body weight, preventing weight gain, or treating obesity of various causes, including drug-induced obesity, and reducing complications associated with obesity including vascular disease (coronary artery disease, stroke, peripheral vascular disease, ischemia reperfusion, etc.), hypertension, onset of diabetes type II, hyperlipidemia and musculoskeletal diseases.

[1191] In other embodiments, the prodrugs are used in conjunction with parenteral administration of nutrients to non-diabetic patients in a hospital setting, e.g., to patients receiving parenteral nutrition or total parenteral nutrition. Nonliminting examples include surgery patients, patients in comas, patients with digestive tract illness, or a nonfunctional gastrointestinal tract (e.g. due to surgical removal, blockage or impaired absorptive capacity, Crohn's disease, ulcerative colitis, gastrointestinal tract obstruction, gastrointestinal tract fistula, acute pancreatitis, ischemic bowel, major gastrointestinal surgery, certain congenital gastrointestinal tract anomalies, prolonged diarrhea, or short bowel syndrome due to surgery, patients in shock, and patients undergoing healing processes often receive parenteral administration of carbohydrates along with various combinations of lipids, electrolytes, minerals, vitamins and amino acids. The glucagon superfamily peptide prodrug and the parenteral nutrition composition can be administered at the same time, at different times, before, or after each other, provided that the glucagon superfamily peptide prodrug is exerting the desired biological effect at the time that the parenteral nutrition composition is being digested. For example, the parenteral nutrition may be administered, 1, 2 or 3 times per day, while the glucagon superfamily peptide prodrug is administered once every other day, three times a week, two times a week, once a week, once every 2 weeks, once every 3 weeks, or once a month.

[1192] Metabolic Syndrome, also known as metabolic syndrome X, insulin resistance syndrome or Reaven's syndrome, is a disorder that affects over 50 million Americans. Metabolic Syndrome is typically characterized by a clustering of at least three or more of the following risk factors: (1) abdominal obesity (excessive fat tissue in and around the abdomen), (2) atherogenic dyslipidemia (blood fat disorders including high triglycerides, low HDL cholesterol and high LDL cholesterol that enhance the accumulation of plaque in the artery walls), (3) elevated blood pressure, (4) insulin resistance or glucose intolerance, (5) prothrombotic state (e.g. high fibrinogen or plasminogen activator inhibitor-1 in blood), and (6) pro-inflammatory state (e.g. elevated C-reactive protein in blood). Other risk factors may include aging, hormonal imbalance and genetic predisposition.

[1193] Metabolic Syndrome is associated with an increased the risk of coronary heart disease and other disorders related to the accumulation of vascular plaque, such as stroke and peripheral vascular disease, referred to as atherosclerotic cardiovascular disease (ASCVD). Patients with Metabolic Syndrome may progress from an insulin resistant state in its early stages to full blown type II diabetes with further increasing risk of ASCVD. Without intending to be bound by any particular theory, the relationship between insulin resistance, Metabolic Syndrome and vascular disease may involve one or more concurrent pathogenic mechanisms including impaired insulin-stimulated vasodilation, insulin resistance-associated reduction in NO availability due to enhanced oxidative stress, and abnormalities in adipocyte-derived hormones such as adiponectin (Lteif and Mather, Can. J. Cardiol. 20 (suppl. B):66B-76B (2004)).

[1194] According to the 2001 National Cholesterol Education Program Adult Treatment Panel (ATP III), any three of the following traits in the same individual meet the criteria for Metabolic Syndrome: (a) abdominal obesity (a waist circumference over 102 cm in men and over 88 cm in women); (b) serum triglycerides (150 mg/dl or above); (c) HDL cholesterol (40 mg/dl or lower in men and 50 mg/dl or lower in women); (d) blood pressure (130/85 or more); and (e) fasting blood glucose (110 mg/dl or above). According to the World Health Organization (WHO), an individual having high insulin levels (an elevated fasting blood glucose or an elevated post meal glucose alone) with at least two of the following criteria meets the criteria for Metabolic Syndrome: (a) abdominal obesity (waist to hip ratio of greater than 0.9, a body mass index of at least 30 kg/m², or a waist measurement over 37 inches); (b) cholesterol panel showing a triglyceride level of at least 150 mg/dl or an HDL cholesterol lower than 35 mg/dl; (c) blood pressure of 140/90 or more, or on treatment for high blood pressure). (Mathur, Ruchi, “Metabolic Syndrome,” ed. Shiel, Jr., William C., MedicineNet.com, May 11, 2009).

[1195] For purposes herein, if an individual meets the criteria of either or both of the criteria set forth by the 2001 National Cholesterol Education Program Adult Treatment Panel or the WHO, that individual is considered as afflicted with Metabolic Syndrome.

[1196] Without being bound to any particular theory, glucagon peptides described herein are useful for treating Metabolic Syndrome. Accordingly, the invention provides a method of preventing or treating Metabolic Syndrome, or reducing one, two, three or more risk factors thereof, in a subject, comprising administering to the subject a glucagon peptide described herein in an amount effective to prevent or treat Metabolic Syndrome, or the risk factor thereof.

[1197] Nonalcoholic fatty liver disease (NAFLD) refers to a wide spectrum of liver disease ranging from simple fatty liver (steatosis), to nonalcoholic steatohepatitis (NASH), to cirrhosis (irreversible, advanced scarring of the liver). All of the stages of NAFLD have in common the accumulation of fat (fatty infiltration) in the liver cells (hepatocytes). Simple fatty liver is the abnormal accumulation of a certain type of fat, triglyceride, in the liver cells with no inflammation or scarring. In NASH, the fat accumulation is associated with varying degrees of inflammation (hepatitis) and scarring (fibrosis) of the liver. The inflammatory cells can destroy the liver cells (hepatocellular necrosis). In the terms “steatohepatitis” and “steatonecrosis”, steato refers to fatty infiltration, hepatitis refers to inflammation in the liver, and necrosis refers to destroyed liver cells. NASH can ultimately lead to scarring of the liver (fibrosis) and then irreversible, advanced scarring (cirrhosis). Cirrhosis that is caused by NASH is the last and most severe stage in the NAFLD spectrum. (Mendler, Michel, “Fatty Liver: Nonalcoholic Fatty Liver Disease (NAFLD) and Nonalcoholic Steatohepatitis (NASH),” ed. Schoenfield, Leslie J., MedicineNet.com, Aug. 29, 2005).

[1198] Alcoholic Liver Disease, or Alcohol-Induced Liver Disease, encompasses three pathologically distinct liver diseases related to or caused by the excessive consumption of alcohol: fatty liver (steatosis), chronic or acute hepatitis, and cirrhosis. Alcoholic hepatitis can range from a mild hepatitis, with abnormal laboratory tests being the only indication of disease, to severe liver dysfunction with complications such as jaundice (yellow skin caused by bilirubin retention), hepatic encephalopathy (neurological dysfunction caused by liver failure), ascites (fluid accumulation in the abdomen), bleeding esophageal varices (varicose veins in the esophagus), abnormal blood clotting and coma. Histologically, alcoholic hepatitis has a characteristic appearance with ballooning degeneration of hepatocytes, inflammation with neutrophils and sometimes Mallory bodies (abnormal aggregations of cellular intermediate filament proteins). Cirrhosis is characterized anatomically by widespread nodules in the liver combined with fibrosis. (Worman, Howard J., “Alcoholic Liver Disease”, Columbia University Medical Center website).

[1199] Without being bound to any particular theory, Class 2 and Class 3 glucagon related peptides described herein are useful for the treatment of Alcoholic Liver Disease, NAFLD, or any stage thereof, including, for example, steatosis, steatohepatitis, hepatitis, hepatic inflammation, NASH, cirrhosis, or complications thereof. Accordingly, the invention provides a method of preventing or treating Alcoholic Liver Disease, NAFLD, or any stage thereof, in a subject comprising administering to a subject a Class 2 or Class 3 glucagon peptide described herein in an amount effective to prevent or treat Alcoholic Liver Disease, NAFLD, or the stage thereof. Such treatment methods include reduction in one, two, three or more of the following: liver fat content, incidence or progression of cirrhosis, incidence of hepatocellular carcinoma, signs of inflammation, e.g. abnormal hepatic enzyme levels (e.g., aspartate aminotransferase AST and/or alanine aminotransferase ALT, or LDH), elevated serum ferritin, elevated serum bilirubin, and/or signs of fibrosis, e.g. elevated TGF-beta levels. In preferred embodiments, the Class 2 or Class 3 glucagon peptides are used treat patients who have progressed beyond simple fatty liver (steatosis) and exhibit signs of inflammation or hepatitis. Such methods may result, for example, in reduction of AST and/or ALT levels.

[1200] GLP-1 and exendin-4 have been shown to have some neuroprotective effect. The invention also provides uses of the glucagon superfamily peptides in treating neurodegenerative diseases, including but not limited to Alzheimer's disease, Parkinson's disease, Multiple Sclerosis, Amylotrophic Lateral Sclerosis, other demyelination related disorders, senile dementia, subcortical dementia, arteriosclerotic dementia, AIDS-associated dementia, or other dementias, a central nervous system cancer, traumatic brain injury, spinal cord injury, stroke or cerebral ischemia, cerebral vasculitis, epilepsy, Huntington's disease, Tourette's syndrome, Guillain Barre syndrome, Wilson disease, Pick's disease, neuroinflammatory disorders, encephalitis, encephalomyelitis or meningitis of viral, fungal or bacterial origin, or other central nervous system infections, prion diseases, cerebellar ataxias, cerebellar degeneration, spinocerebellar degeneration syndromes, Friedreichs ataxia, ataxia telangiectasia, spinal dysmyotrophy, progressive supranuclear palsy, dystonia, muscle spasticity, tremor, retinitis pigmentosa, striatonigral degeneration, mitochondrial encephalo-myopathies, neuronal ceroid lipofuscinosis, hepatic encephalopathies, renal encephalopathies, metabolic encephalopathies, toxin-induced encephalopathies, and radiation-induced brain damage.

[1201] Accordingly, the invention provides a method of preventing or treating neurodegenerative diseases, or reducing one, two, three or more risk factors thereof, in a subject, comprising administering to the subject a glucagon peptide described herein in an amount effective to prevent or treat a neurodegenerative disease, or the risk factor thereof.

[1202] The method of treating in accordance with the present invention comprises the steps of administering the presently disclosed prodrugs to a patient using any standard route of administration, including parenterally, such as intravenously, intraperitoneally, subcutaneously or intramuscularly, intrathecally, transdermally, rectally, orally, nasally or by inhalation. In some embodiments the composition is administered subcutaneously or intramuscularly, optionally into a depot or as part of a slow-release composition.

### Compositions and Combinations

[1203] The prodrugs of the invention may be administered alone or in combination with a second agent such as anti-diabetic or anti-obesity agents. In some aspects, a prodrug is administered in combination with a second prodrug or a glucagon superfamily member, including for example a glucagon related peptide. In certain embodiments, a prodrug is administered in combination with and anti-diabetic agent, including but not limited to insulin, sulfonylureas, such as tolbutamide (Orinase), acetohexamide (Dymelor), tolazamide (Tolinase), chlorpropamide (Diabinese), glipizide (Glucotrol), glyburide (Diabeta, Micronase, Glynase), glimepiride (Amaryl), or gliclazide (Diamicron); meglitinides, such as repaglinide (Prandin) or nateglinide (Starlix); biguanides such as metformin (Glucophage) or phenformin; thiazolidinediones such as rosiglitazone (Avandia), pioglitazone (Actos), or troglitazone (Rezulin), or other PPARγ inhibitors; alpha glucosidase inhibitors that inhibit carbohydrate digestion, such as miglitol (Glyset), acarbose (Precose/Glucobay); exenatide (Byetta) or pramlintide; Dipeptidyl peptidase-4 (DPP-IV) inhibitors such as vildagliptin or sitagliptin; SGLT (sodium-dependent glucose transporter 1) inhibitors; or FBPase (fructose 1,6-bisphosphatase) inhibitors.

[1204] Anti-obesity agents known in the art or under investigation include but are not limited to appetite suppressants, including phenethylamine type stimulants, phentermine (optionally with fenfluramine or dexfenfluramine), diethylpropion (Tenuate®), phendimetrazine (Prelu-2®, Bontril®), benzphetamine (Didrex®), sibutramine (Meridia®, Reductil®); rimonabant (Acomplia®), other cannabinoid receptor antagonists; oxyntomodulin; fluoxetine hydrochloride (Prozac); Qnexa (topiramate and phentermine), Excalia (bupropion and zonisamide) or Contrave (bupropion and naltrexone); or lipase inhibitors, similar to xenical (Orlistat) or Cetilistat (also known as ATL-962), or GT 389-255.

[1205] The prodrugs of the present invention can also be administered to patients suffering from catabolic wasting. It is estimated that over half of cancer patients experience catabolic wasting which is characterized by unintended and progressive weight loss, weakness, and low body fat and muscle. The syndrome is equally common in AIDS patients and can also be present in bacterial and parasitic diseases, rheumatoid arthritis, and chronic diseases of the bowel, liver, lungs, and heart. It is usually associated with anorexia and can manifest as a condition in aging or as a result of physical trauma. Catabolic wasting is a symptom that diminishes the quality of life, worsens the underlying condition, and is a major cause of death.

[1206] Pharmaceutical compositions comprising the prodrugs disclosed herein can be formulated and administered to patients using standard pharmaceutically acceptable carriers and routes of administration known to those skilled in the art. Accordingly, the present disclosure also encompasses pharmaceutical compositions comprising one or more of the prodrugs disclosed herein, or a pharmaceutically acceptable salt thereof, in combination with a pharmaceutically acceptable carrier. In some embodiments the pharmaceutical composition comprises a 1 mg/ml concentration of the prodrug at pH of about 4.0 to about 7.0 in a phosphate buffer system. The pharmaceutical compositions may comprise the prodrug as the sole pharmaceutically active component, or the prodrugs can be combined with one or more additional active agents. In accordance with some embodiments a composition is provided comprising a prodrug of the present invention. Alternatively, a composition is provided for inducing weight loss or preventing weight gain can be provided that comprises a prodrug and an anti-obesity peptide. Suitable anti-obesity peptides include those disclosed in U.S. Pat. Nos. 5,691,309, 6,436,435 or US Patent application 20050176643.

[1207] In accordance with some embodiments a pharmaceutical composition is provided comprising any of the novel prodrugs disclosed herein, preferably sterile and preferably at a purity level of at least 90%, 91%, 92%, 93%, 94%, 95%, 96%, 97%, 98% or 99%, and a pharmaceutically acceptable diluent, carrier or excipient. Such compositions may contain a bioactive peptide prodrug derivative as disclosed herein, wherein the resulting active peptide is present at a concentration of at least 0.5 mg/ml, 1 mg/ml, 2 mg/ml, 3 mg/ml, 4 mg/ml, 5 mg/ml, 6 mg/ml, 7 mg/ml, 8 mg/ml, 9 mg/ml, 10 mg/ml, 11 mg/ml, 12 mg/ml, 13 mg/ml, 14 mg/ml, 15 mg/ml, 16 mg/ml, 17 mg/ml, 18 mg/ml, 19 mg/ml, 20 mg/ml, 21 mg/ml, 22 mg/ml, 23 mg/ml, 24 mg/ml, 25 mg/ml or higher. Such compositions may contain a bioactive peptide prodrug derivative of Class 1, 2, or 3 as disclosed herein, wherein the resulting active peptide is present at a concentration of at least A, wherein A is 0.001 mg/ml, 0.01 mg/ml, 0.1 mg/ml, 0.5 mg/ml, 1 mg/ml, 2 mg/ml, 3 mg/ml, 4 mg/ml, 5 mg/ml, 6 mg/ml, 7 mg/ml, 8 mg/ml, 9 mg/ml, 10 mg/ml, 11 mg/ml, 12 mg/ml, 13 mg/ml, 14 mg/ml, 15 mg/ml, 16 mg/ml, 17 mg/ml, 18 mg/ml, 19 mg/ml, 20 mg/ml, 21 mg/ml, 22 mg/ml, 23 mg/ml, 24 mg/ml, 25 mg/ml or higher. In other embodiments, such compositions may contain an active peptide of Class 1, 2, or 3 at a concentration of at most B, wherein B is 30 mg/ml, 25 mg/ml, 24 mg/ml, 23, mg/ml, 22 mg/ml, 21 mg/ml, 20 mg/ml, 19 mg/ml, 18 mg/ml, 17 mg/ml, 16 mg/ml, 15 mg/ml, 14 mg/ml, 13 mg/ml, 12 mg/ml, 11 mg/ml 10 mg/ml, 9 mg/ml, 8 mg/ml, 7 mg/ml, 6 mg/ml, 5 mg/ml, 4 mg/ml, 3 mg/ml, 2 mg/ml, 1 mg/ml, or 0.1 mg/ml. In some embodiments, the compositions may contain a Class 1, 2, or 3 glucagon related peptide at a concentration range of A to B mg/ml, for example, 0.001 to 30.0 mg/ml. In some embodiments the pharmaceutical compositions comprise aqueous solutions that are sterilized and optionally stored within various containers. The compounds of the present invention can be used in accordance with some embodiments to prepare pre-formulated solutions ready for injection. In other embodiments the pharmaceutical compositions comprise a lyophilized powder. The pharmaceutical compositions can be further packaged as part of a kit that includes a disposable device for administering the composition to a patient. The containers or kits may be labeled for storage at ambient room temperature or at refrigerated temperature.

[1208] All therapeutic methods, pharmaceutical compositions, kits and other similar embodiments described herein contemplate that the prodrug compounds include all pharmaceutically acceptable salts thereof.

[1209] In some embodiments the kit is provided with a device for administering the prodrug composition to a patient. The kit may further include a variety of containers, e.g., vials, tubes, bottles, and the like. Preferably, the kits will also include instructions for use. In accordance with some embodiments the device of the kit is an aerosol dispensing device, wherein the composition is prepackaged within the aerosol device. In another embodiment the kit comprises a syringe and a needle, and in some embodiments the prodrug composition is prepackaged within the syringe.

[1210] Pharmaceutical Formulations Of Class 1, 2, and 3 Glucagon Related Peptides

[1211] In accordance with some embodiments a pharmaceutical composition is provided wherein the composition comprises a glucadon peptide of the present disclosure, or pharmaceutically acceptable salt thereof, and a pharmaceutically acceptable carrier. The pharmaceutical composition can comprise any pharmaceutically acceptable ingredient, including, for example, acidifying agents, additives, adsorbents, aerosol propellants, air displacement agents, alkalizing agents, anticaking agents, anticoagulants, antimicrobial preservatives, antioxidants, antiseptics, bases, binders, buffering agents, chelating agents, coating agents, coloring agents, desiccants, detergents, diluents, disinfectants, disintegrants, dispersing agents, dissolution enhancing agents, dyes, emollients, emulsifying agents, emulsion stabilizers, fillers, film forming agents, flavor enhancers, flavoring agents, flow enhancers, gelling agents, granulating agents, humectants, lubricants, mucoadhesives, ointment bases, ointments, oleaginous vehicles, organic bases, pastille bases, pigments, plasticizers, polishing agents, preservatives, sequestering agents, skin penetrants, solubilizing agents, solvents, stabilizing agents, suppository bases, surface active agents, surfactants, suspending agents, sweetening agents, therapeutic agents, thickening agents, tonicity agents, toxicity agents, viscosity-increasing agents, water-absorbing agents, water-miscible cosolvents, water softeners, or wetting agents.

[1212] In some embodiments, the pharmaceutical composition comprises any one or a combination of the following components: acacia, acesulfame potassium, acetyltributyl citrate, acetyltriethyl citrate, agar, albumin, alcohol, dehydrated alcohol, denatured alcohol, dilute alcohol, aleuritic acid, alginic acid, aliphatic polyesters, alumina, aluminum hydroxide, aluminum stearate, amylopectin, α-amylose, ascorbic acid, ascorbyl palmitate, aspartame, bacteriostatic water for injection, bentonite, bentonite magma, benzalkonium chloride, benzethonium chloride, benzoic acid, benzyl alcohol, benzyl benzoate, bronopol, butylated hydroxyanisole, butylated hydroxytoluene, butylparaben, butylparaben sodium, calcium alginate, calcium ascorbate, calcium carbonate, calcium cyclamate, dibasic anhydrous calcium phosphate, dibasic dehydrate calcium phosphate, tribasic calcium phosphate, calcium propionate, calcium silicate, calcium sorbate, calcium stearate, calcium sulfate, calcium sulfate hemihydrate, canola oil, carbomer, carbon dioxide, carboxymethyl cellulose calcium, carboxymethyl cellulose sodium, β-carotene, carrageenan, castor oil, hydrogenated castor oil, cationic emulsifying wax, cellulose acetate, cellulose acetate phthalate, ethyl cellulose, microcrystalline cellulose, powdered cellulose, silicified microcrystalline cellulose, sodium carboxymethyl cellulose, cetostearyl alcohol, cetrimide, cetyl alcohol, chlorhexidine, chlorobutanol, chlorocresol, cholesterol, chlorhexidine acetate, chlorhexidine gluconate, chlorhexidine hydrochloride, chlorodifluoroethane (HCFC), chlorodifluoromethane, chlorofluorocarbons (CFC)chlorophenoxyethanol, chloroxylenol, corn syrup solids, anhydrous citric acid, citric acid monohydrate, cocoa butter, coloring agents, corn oil, cottonseed oil, cresol, m-cresol, o-cresol, p-cresol, croscarmellose sodium, crospovidone, cyclamic acid, cyclodextrins, dextrates, dextrin, dextrose, dextrose anhydrous, diazolidinyl urea, dibutyl phthalate, dibutyl sebacate, diethanolamine, diethyl phthalate, difluoroethane (HFC), dimethyl-β-cyclodextrin, cyclodextrin-type compounds such as Captisol®, dimethyl ether, dimethyl phthalate, dipotassium edentate, disodium edentate, disodium hydrogen phosphate, docusate calcium, docusate potassium, docusate sodium, dodecyl gallate, dodecyltrimethylammonium bromide, edentate calcium disodium, edtic acid, eglumine, ethyl alcohol, ethylcellulose, ethyl gallate, ethyl laurate, ethyl maltol, ethyl oleate, ethylparaben, ethylparaben potassium, ethylparaben sodium, ethyl vanillin, fructose, fructose liquid, fructose milled, fructose pyrogen-free, powdered fructose, fumaric acid, gelatin, glucose, liquid glucose, glyceride mixtures of saturated vegetable fatty acids, glycerin, glyceryl behenate, glyceryl monooleate, glyceryl monostearate, self-emulsifying glyceryl monostearate, glyceryl palmitostearate, glycine, glycols, glycofurol, guar gum, heptafluoropropane (HFC), hexadecyltrimethylammonium bromide, high fructose syrup, human serum albumin, hydrocarbons (HC), dilute hydrochloric acid, hydrogenated vegetable oil, type II, hydroxyethyl cellulose, 2-hydroxyethyl-β-cyclodextrin, hydroxypropyl cellulose, low-substituted hydroxypropyl cellulose, 2-hydroxypropyl-β-cyclodextrin, hydroxypropyl methylcellulose, hydroxypropyl methylcellulose phthalate, imidurea, indigo carmine, ion exchangers, iron oxides, isopropyl alcohol, isopropyl myristate, isopropyl palmitate, isotonic saline, kaolin, lactic acid, lactitol, lactose, lanolin, lanolin alcohols, anhydrous lanolin, lecithin, magnesium aluminum silicate, magnesium carbonate, normal magnesium carbonate, magnesium carbonate anhydrous, magnesium carbonate hydroxide, magnesium hydroxide, magnesium lauryl sulfate, magnesium oxide, magnesium silicate, magnesium stearate, magnesium trisilicate, magnesium trisilicate anhydrous, malic acid, malt, maltitol, maltitol solution, maltodextrin, maltol, maltose, mannitol, medium chain triglycerides, meglumine, menthol, methylcellulose, methyl methacrylate, methyl oleate, methylparaben, methylparaben potassium, methylparaben sodium, microcrystalline cellulose and carboxymethylcellulose sodium, mineral oil, light mineral oil, mineral oil and lanolin alcohols, oil, olive oil, monoethanolamine, montmorillonite, octyl gallate, oleic acid, palmitic acid, paraffin, peanut oil, petrolatum, petrolatum and lanolin alcohols, pharmaceutical glaze, phenol, liquified phenol, phenoxyethanol, phenoxypropanol, phenylethyl alcohol, phenylmercuric acetate, phenylmercuric borate, phenylmercuric nitrate, polacrilin, polacrilin potassium, poloxamer, polydextrose, polyethylene glycol, polyethylene oxide, polyacrylates, polyethylene-polyoxypropylene-block polymers, polymethacrylates, polyoxyethylene alkyl ethers, polyoxyethylene castor oil derivatives, polyoxyethylene sorbitol fatty acid esters, polyoxyethylene stearates, polyvinyl alcohol, polyvinyl pyrrolidone, potassium alginate, potassium benzoate, potassium bicarbonate, potassium bisulfite, potassium chloride, potassium citrate, potassium citrate anhydrous, potassium hydrogen phosphate, potassium metabisulfite, monobasic potassium phosphate, potassium propionate, potassium sorbate, povidone, propanol, propionic acid, propylene carbonate, propylene glycol, propylene glycol alginate, propyl gallate, propylparaben, propylparaben potassium, propylparaben sodium, protamine sulfate, rapeseed oil, Ringer's solution, saccharin, saccharin ammonium, saccharin calcium, saccharin sodium, safflower oil, saponite, serum proteins, sesame oil, colloidal silica, colloidal silicon dioxide, sodium alginate, sodium ascorbate, sodium benzoate, sodium bicarbonate, sodium bisulfite, sodium chloride, anhydrous sodium citrate, sodium citrate dehydrate, sodium chloride, sodium cyclamate, sodium edentate, sodium dodecyl sulfate, sodium lauryl sulfate, sodium metabisulfite, sodium phosphate, dibasic, sodium phosphate, monobasic, sodium phosphate, tribasic, anhydrous sodium propionate, sodium propionate, sodium sorbate, sodium starch glycolate, sodium stearyl fumarate, sodium sulfite, sorbic acid, sorbitan esters (sorbitan fatty esters), sorbitol, sorbitol solution 70%, soybean oil, spermaceti wax, starch, corn starch, potato starch, pregelatinized starch, sterilizable maize starch, stearic acid, purified stearic acid, stearyl alcohol, sucrose, sugars, compressible sugar, confectioner's sugar, sugar spheres, invert sugar, Sugartab, Sunset Yellow FCF, synthetic paraffin, talc, tartaric acid, tartrazine, tetrafluoroethane (HFC), theobroma oil, thimerosal, titanium dioxide, alpha tocopherol, tocopheryl acetate, alpha tocopheryl acid succinate, beta-tocopherol, delta-tocopherol, gamma-tocopherol, tragacanth, triacetin, tributyl citrate, triethanolamine, triethyl citrate, trimethyl-β-cyclodextrin, trimethyltetradecylammonium bromide, tris buffer, trisodium edentate, vanillin, type I hydrogenated vegetable oil, water, soft water, hard water, carbon dioxide-free water, pyrogen-free water, water for injection, sterile water for inhalation, sterile water for injection, sterile water for irrigation, waxes, anionic emulsifying wax, carnauba wax, cationic emulsifying wax, cetyl ester wax, microcrystalline wax, nonionic emulsifying wax, suppository wax, white wax, yellow wax, white petrolatum, wool fat, xanthan gum, xylitol, zein, zinc propionate, zinc salts, zinc stearate, or any excipient in the Handbook of Pharmaceutical Excipients, Third Edition, A. H. Kibbe (Pharmaceutical Press, London, UK, 2000), which is incorporated by reference in its entirety. Remington's Pharmaceutical Sciences, Sixteenth Edition, E. W. Martin (Mack Publishing Co., Easton, Pa., 1980), which is incorporated by reference in its entirety, discloses various components used in formulating pharmaceutically acceptable compositions and known techniques for the preparation thereof. Except insofar as any conventional agent is incompatible with the pharmaceutical compositions, its use in pharmaceutical compositions is contemplated. Supplementary active ingredients also can be incorporated into the compositions.

[1213] The pharmaceutical formulations disclosed herein may be designed to be short-acting, fast-releasing, long-acting, or sustained-releasing as described below. The pharmaceutical formulations may also be formulated for immediate release, controlled release or for slow release. The instant compositions may further comprise, for example, micelles or liposomes, or some other encapsulated form, or may be administered in an extended release form to provide a prolonged storage and/or delivery effect. The disclosed pharmaceutical formulations may be administered according to any regime including, for example, daily (1 time per day, 2 times per day, 3 times per day, 4 times per day, 5 times per day, 6 times per day), every two days, every three days, every four days, every five days, every six days, weekly, bi-weekly, every three weeks, monthly, or bi-monthly.

[1214] In some embodiments, the foregoing component(s) may be present in the pharmaceutical composition at any concentration, such as, for example, at least A, wherein A is 0.0001% w/v, 0.001% w/v, 0.01% w/v, 0.1% w/v, 1% w/v, 2% w/v, 5% w/v, 10% w/v, 20% w/v, 30% w/v, 40% w/v, 50% w/v, 60% w/v, 70% w/v, 80% w/v, or 90% w/v. In some embodiments, the foregoing component(s) may be present in the pharmaceutical composition at any concentration, such as, for example, at most B, wherein B is 90% w/v, 80% w/v, 70% w/v, 60% w/v, 50% w/v, 40% w/v, 30% w/v, 20% w/v, 10% w/v, 5% w/v, 2% w/v, 1% w/v, 0.1% w/v, 0.001% w/v, or 0.0001%. In other embodiments, the foregoing component(s) may be present in the pharmaceutical composition at any concentration range, such as, for example from about A to about B. In some embodiments, A is 0.0001% and B is 90%.

[1215] The pharmaceutical compositions may be formulated to achieve a physiologically compatible pH. In some embodiments, the pH of the pharmaceutical composition may be at least 5, at least 5.5, at least 6, at least 6.5, at least 7, at least 7.5, at least 8, at least 8.5, at least 9, at least 9.5, at least 10, or at least 10.5 up to and including pH 11, depending on the formulation and route of administration. In certain embodiments, the pharmaceutical compositions may comprise buffering agents to achieve a physiological compatible pH. The buffering agents may include any compounds capable of buffering at the desired pH such as, for example, phosphate buffers (e.g. PBS), triethanolamine, Tris, bicine, TAPS, tricine, HEPES, TES, MOPS, PIPES, cacodylate, MES, and others. In certain embodiments, the strength of the buffer is at least 0.5 mM, at least 1 mM, at least 5 mM, at least 10 mM, at least 20 mM, at least 30 mM, at least 40 mM, at least 50 mM, at least 60 mM, at least 70 mM, at least 80 mM, at least 90 mM, at least 100 mM, at least 120 mM, at least 150 mM, or at least 200 mM. In some embodiments, the strength of the buffer is no more than 300 mM (e.g. at most 200 mM, at most 100 mM, at most 90 mM, at most 80 mM, at most 70 mM, at most 60 mM, at most 50 mM, at most 40 mM, at most 30 mM, at most 20 mM, at most 10 mM, at most 5 mM, at most 1 mM).

[1216] The prodrug compounds disclosed herein may be prepared by standard synthetic methods, recombinant DNA techniques, or any other methods of preparing peptides and fusion proteins. Although certain non-natural amino acids cannot be expressed by standard recombinant DNA techniques, techniques for their preparation are known in the art. Compounds of this invention that encompass non-peptide portions may be synthesized by standard organic chemistry reactions, in addition to standard peptide chemistry reactions when applicable.

### EXAMPLES

[1217] General Pegylation Protocol: (Cys-maleimido)

[1218] Typically, the glucagon related peptide containing Cys is dissolved in phosphate buffered saline (5-10 mg/ml) and 0.01 Methylenediamine tetraacetic acid is added (10-15% of total volume). Excess (2-fold) maleimido methoxyPEG reagent (Dow) is added and the reaction stirred at room temperature while monitoring reaction progress by high performance liquid chromatography (HPLC). After 8-24 hrs, the reaction mixture is acidified and loaded onto a preparative reverse phase column for purification using 0.1% tetrafluoroacetic acid (TFA)/acetonitrile in the gradient mode. The appropriate fractions were combined and lyophilized to give the desired pegylated derivatives.

### Example 1

### Dipeptide Cleavage Half Time (in PBS) Determination on Model Peptide

[1219] A model hexapeptide (HSRGTF-NH₂; SEQ ID NO:715) was used as a model to determine the half life of various dipeptides linked to the hexapeptide through an amide bond. The hexapeptide was assembled on a peptide synthesizer. To confirm the integrity of the synthesis and the availability of an extendable N-terminus, the peptide-bound resin was cleaved by hydrofluoric acid (HF) and analyzed. Then Boc-protected sarcosine and lysine were successively introduced to the peptide-bound resin to produce peptide A (dipeptide+model peptide). Peptide A was cleaved by HF and purified by preparative HPLC.

[1220] Preparative Purification using HPLC:

[1221] Purification was performed using HPLC analysis on a silica based 1×25 cm Vydac C18 (5μ particle size, 300 A° pore size) column. The instruments used were: Waters Associates model 600 pump, Injector model 717, and UV detector model 486. A wavelength of 230 nm was used for all samples. Solvent A contained 10% CH₃CN/0.1% TFA in distilled water, and solvent B contained 0.1% TFA in CH₃CN. A linear gradient was employed (0 to 100% B in 2 hours). The flow rate was 10 mL/min and the fraction size was 4 mL. From about 150 mg of crude peptide, 30 mg of the pure peptide (about 20% yield) was typically obtained.

[1222] Peptide A was dissolved at 1 mg/mL concentration in phosphate buffered saline (PBS) buffer (PH 7.4). Then it was incubated at 37° C. in a water bath. The analytical samples were collected at different time points (5 h, 8 h, 24 h, 31 h, 47 h) and quenched by the same volume of 0.1% TFA. HPLC was used to monitor the cleavage reaction. The data were qualitatively monitored by liquid chromatography-mass spectrometry (LC-MS) and quantitatively analyzed by HPLC Peak Simple Chromatography software to obtain the retention time and relative peak area for the prodrug modification.

### Analysis Using Mass Spectrometry

[1223] The mass spectra were obtained using a Sciex API-III electrospray quadrapole mass spectrometer with a standard electron spray ionization (ESI) ion source. Ionization conditions that were used are as follows: ESI in the positive-ion mode; ion spray voltage, 3.9 kV; orifice potential, 60 V. The nebulizing and curtain gas used was nitrogen at a flow rate of 0.9 L/min. Mass spectra were recorded from 600-1800 Thompsons (Th) at 0.5 Th per step and 2 msec dwell time. The sample (about 1 mg/mL) was dissolved in 50% aqueous acetonitrile with 1% acetic acid and introduced by an external syringe pump at the rate of 5 μL/min.

[1224] When the peptides were analyzed in PBS solution by ESI-MS, they were first desalted using a ZipTip solid phase extraction tip containing 0.6 μL C4 resin, according to instructions provided by the manufacturer (Millipore Corporation, Billerica, Mass., see http://www.millipore.com/catalogue.nsf/docs/C5737).

Analysis using HPLC

[1225] The HPLC analyses were performed using a Beckman System Gold Chromatography system using a UV detector at 214 nm and a 150 mm×4.6 mm C8 Vydac column. The flow rate was 1 mL/min. Solvent A contained 0.1% TFA in distilled water, and solvent B contained 0.1% TFA in 90% CH₃CN. A linear gradient was employed (0% to 30% B in 10 minutes). The data were collected and analyzed using Peak Simple Chromatography software.

[1226] The initial rates of cleavage were used to measure the rate constant for the dissociation of the respective prodrugs. The concentrations of the prodrug and the drug were estimated from their peak areas, ‘a’ and ‘b’ respectively, for each of the different collection times (see Table 1). The first order dissociation rate constants of the prodrugs were determined by plotting the logarithm of the concentration of the prodrug at various time intervals. The slope of this plot gives the rate constant I′. The half lives of the degradation of the various prodrugs were then calculated by using the formula t_{1/2}=0.693/k.

TABLE 1
HPLC and LC-MS data of Cleavage of A peptide (lys-sar-HSRGTF-NH₂) in PBS

| | 5 h | | 8 h | | 24 h | | 31 h | | 47 h | |
|---|---|---|---|---|---|---|---|---|---|---|
| HPLC peaks | a | b | a | b | a | b | a | b | a | b |
| Retention time(min) | 4.3 | 4.8 | 4.2 | 4.7 | 4.3 | 4.8 | 4.3 | 4.8 | 4.3 | 4.8 |
| Molecular weight | 702 | 902 | 702 | 902 | 702 | 902 | 702 | 902 | 702 | 902 |
| Relative peak area(%) | 26.5 | 73.5 | 28.9 | 71.1 | 28.8 | 71.2 | 77.7 | 22.3 | 90.0 | 10.0 |

[1227] The half lives of the degradation of the various prodrugs were calculated by using the formula t_{1/2}=0.693/k and the half life of the lys-sar combination on model peptide HSRGTF-NH₂ (SEQ ID NO: 715) was determined to be 14.0 h.

### Example 2

### Dipeptide Cleavage Half Time (in Plasma) Determination on D-Model Peptide

[1228] Another model hexapeptide (dHdTdRGdTdF-NH₂ SEQ ID NO: 716) was used as a model to determine the half-life of dipeptides combination in plasma. D amino acids were used to prevent other enzymatic cleavage of the model peptide except for prodrug cleavage. The hexapeptide was synthesized by auto-synthesizer. To confirm that a feasible extended N-terminus could be used for the prodrug modification, the peptide-bound resin was cleaved by HF to check the validity. Then Boc-protected sarcosine and lysine were successively introduced to the peptide-bound resin. The peptide B (dipeptide+d-model peptide) was cleaved by HF and purified by preparative HPLC.

[1229] Preparative Purification Using HPLC:

[1230] Purification was performed using HPLC analysis on a silica based 1×25 cm Vydac C18 (5μ particle size, 300 A° pore size) column. The instruments used were: Waters Associates model 600 pump, Injector model 717, and UV detector model 486. A wavelength of 230 nm was used for all samples. Solvent A contained 10% CH₃CN/0.1% TFA in distilled water, and solvent B contained 0.1% TFA in CH₃CN. A linear gradient was employed (0 to 100% B in 2 hours). The flow rate was 10 mL/min and the fraction size was 4 mL. From about 150 mg of crude peptide, 30 mg of the pure peptide (about 20% yield) was typically obtained.

[1231] Peptide B was dissolved at 2 mg/mL concentration in plasma (pH 7.4). Then it was incubated in a 37° C. water bath. The analytical samples were collected at different time points (5 h, 11 h, 24 h, 32 h, 48 h). The samples were treated by 10-fold volume of 0.1% TFA/ACN and centrifuged at 3000 rpm. The supernatant fluid was collected and diluted with the same volume of 0.1% TFA/H₂O. HPLC was used to monitor the cleavage reaction. The data were qualitatively monitored by LC-MS and quantitatively analyzed by HPLC Peak Simple Chromatography software to obtain the retention time and relative peak area.

### Analysis Using Mass Spectrometry

[1232] The mass spectra were obtained using a Sciex API-III electrospray quadrapole mass spectrometer with a standard ESI ion source. Ionization conditions that were used are as follows: ESI in the positive-ion mode; ion spray voltage, 3.9 kV; orifice potential, 60 V. The nebulizing and curtain gas used was nitrogen at a flow rate of 0.9 L/min. Mass spectra were recorded from 600-1800 Thompsons at 0.5 Th per step and 2 msec dwell time. The sample (about 1 mg/mL) was dissolved in 50% aqueous acetonitrile with 1% acetic acid and introduced by an external syringe pump at the rate of 5 μL/min.

[1233] Analysis Using HPLC

[1234] The HPLC analyses were performed using a Beckman System Gold Chromatography system using a UV detector at 214 nm and a 150 mm×4.6 mm C8 Vydac column. The flow rate was 1 mL/min. Solvent A contained 0.1% TFA in distilled water, and solvent B contained 0.1% TFA in 90% CH₃CN. A linear gradient was employed (0% to 30% B in 10 minutes). The data were collected and analyzed using Peak Simple Chromatography software.

[1235] The initial rates of cleavage were used to measure the rate constant for the dissociation of the respective prodrugs. The concentrations of the prodrug and the drug were estimated from their peak areas, ‘a’ and ‘b’ respectively, for each of the different collection times (see Table 2). The first order dissociation rate constants of the prodrugs were determined by plotting the logarithm of the concentration of the prodrug at various time intervals. The slope of this plot gives the rate constant I′. The half lives of the degradation of the various prodrugs were then calculated by using the formula t_{1/2}=0.693/k.

TABLE 2
HPLC and LC-MS data of Cleavage of B peptide (lys-sar-dHdTdRGdTdF-NH₂) in plasma

| | 5 h | | 11 h | | 24 h | | 32 h | | 48 h | |
|---|---|---|---|---|---|---|---|---|---|---|
| HPLC peaks | a | b | a | b | a | B | a | b | a | b |
| Retention time(min) | 5.7 | 6.2 | 5.8 | 6.3 | 5.7 | 6.2 | 5.7 | 6.2 | 5.7 | 6.2 |
| Molecular weight | 702 | 902 | 702 | 902 | 702 | 902 | 702 | 902 | 702 | 902 |
| Relative peak area(%) | 17.0 | 83.0 | 29.2 | 70.8 | 60.2 | 39.8 | 54.0 | 46.0 | 27.6 | 72.4 |

[1236] The half lives of the degradation of the various prodrugs were then calculated by using the formula t_{1/2}=0.693/k. Using this formula, the half life of Lys-Sar combination in plasma on a D-model peptide dHdTdRGdTdF-NH₂ (SEQ ID NO: 716) was determined to be 18.6 h.

### Example 3

[1237] The cleavage half lives of various additional dipeptides linked to the model hexapeptide (HSRGTF-NH₂; SEQ ID NO: 715) were determined using the procedures described in Example 1. The data generated in these experiments is presented in Tables 3 and 4.

TABLE 3
Cleavage of the Dipeptides A-B that are linked to the side chain of an
N-terminal para-amino-Phe from the Model HexaPeptides in PBS

[chemical structure]

| | A | B | | |
|---|---|---|---|---|
| Compounds | (amino acid) | (amino acid) | t_{1/2} | |
| 1 | F | P | 58 | h |
| 2 | Hydroxyl-F | P | 327 | h |
| 3 | d-F | P | 20 | h |
| 4 | d-F | d-P | 39 | h |
| 5 | G | P | 72 | h |
| 6 | Hydroxyl-G | P | 603 | h |
| 7 | L | P | 62 | h |
| 8 | tert-L | P | 200 | h |
| 9 | S | P | 34 | h |
| 10 | P | P | 97 | h |
| 11 | K | P | 33 | h |
| 12 | dK | P | 11 | h |
| 13 | E | P | 85 | h |
| 14 | Sar | P | about 1000 | h |
| 15 | Aib | P | 69 | min |
| 16 | Hydroxyl-Aib | P | 33 | h |
| 17 | cyclohexane | P | 6 | min |
| 18 | G | G | No cleavage | |
| 19 | Hydroxyl-G | G | No cleavage | |
| 20 | S | N-Methyl-Gly | 4.3 | h |
| 21 | K | N-Methyl-Gly | 5.2 | h |
| 22 | Aib | N-Methyl-Gly | 7.1 | min |
| 23 | Hydroxyl-Aib | N-Methyl-Gly | 1.0 | h |

TABLE 4
Cleavage of the Dipeptides A-B linked to variable amino acids at position 1 (X₁) from the
Model Hexapeptide (X₁-S R G T F-NH₂ (SEQ. ID. NO.: 732)) in PBS
NH₂-A-B-X₁-S R G T F-NH₂

| Compounds | A (amino acid) | B (amino acid) | X₁ (amino acid) | t_{1/2} | |
|---|---|---|---|---|---|
| 1 | F | P | H | No cleavage | |
| 2 | Hydroxyl-F | P | H | No cleavage | |
| 3 | G | P | H | No cleavage | |
| 4 | Hydroxyl-G | P | H | No cleavage | |
| 5 | A | P | H | No cleavage | |
| 6 | C | P | H | No cleavage | |
| 7 | S | P | H | No cleavage | |
| 8 | P | P | H | No cleavage | |
| 9 | K | P | H | No cleavage | |
| 10 | E | P | H | No cleavage | |
| 11 | Dehydro V | P | H | No cleavage | |
| 12 | P | d-P | H | No cleavage | |
| 13 | d-P | P | H | No cleavage | |
| 14 | Aib | P | H | 32 | h |
| 15 | Aib | d-P | H | 20 | h |
| 16 | Aib | P | d-H | 16 | h |
| 17 | Cyclohexyl- | P | H | 5 | h |
| 18 | Cyclopropyl- | P | H | 10 | h |
| 19 | N-Me-Aib | P | H | >500 | h |
| 20 | α,α-diethyl-Gly | P | H | 46 | h |
| 21 | Hydroxyl-Aib | P | H | 61 | h |
| 22 | Aib | P | A | 58 | h |
| 23 | Aib | P | N-Methyl-His | 30 | h |
| 24 | Aib | N-Methyl-Gly | H | 49 | min |
| 25 | Aib | N-Hexyl-Gly | H | 10 | min |
| 26 | Aib | Azetidine-2- | H | >500 | h |
| | | carboxylic acid | | | |
| 27 | G | N-Methyl-Gly | H | 104 | h |
| 28 | Hydroxyl-G | N-Methyl-Gly | H | 149 | h |
| 29 | G | N-Hexyl-Gly | H | 70 | h |
| 30 | dK | N-Methyl-Gly | H | 27 | h |
| 31 | dK | N-Methyl-Ala | H | 14 | h |
| 32 | dK | N-Methyl-Phe | H | 57 | h |
| 33 | K | N-Methyl-Gly | H | 14 | h |
| 34 | F | N-Methyl-Gly | H | 29 | h |
| 35 | S | N-Methyl-Gly | H | 17 | h |
| 36 | P | N-Methyl-Gly | H | 181 | h |

### Example 4

### Synthesis of Glucagon and GLP-1 Analogs

[1238] To investigate the possibility of preparing a bioactive derivative of glucagon and GLP-1, numerous peptide analogs were synthesized. The standard procedure is described briefly here, and the details are discussed later.

[1239] Materials:

[1240] PAM resin (PAM resin is OCH₂-phenylacetamidomethyl-copolystyrene-1% divinylbenzene), (100-180 mesh, 1% DVB cross-linked polystyrene; loading of 0.7-1.0 mmol/g), Boc-protected and Fmoc protected amino acids were purchased from Midwest Biotech. Other reagents such as the α-hydroxy-acids (phenyllacetic acid and glycolic acid) were purchased from Aldrich. The solid phase peptide syntheses using Boc-protected amino acids were performed on an Applied Biosystem 430A Peptide Synthesizer. Fmoc protected amino acid synthesis was performed using the Applied Biosystems Model 433 Peptide Synthesizer. The manual synthesis of depsi-peptides was performed in sintered reaction vessels using analogous procedures (Schnolzer, M., et al., (1992) Int J Pept Protein Res 40(3-4):180-193).

[1241] Peptide Synthesis (Boc Amino Acids/HF Cleavage):

[1242] Synthesis of these analogs was performed on the Applied Biosystem Model 430A Peptide Synthesizer. Synthetic peptides were constructed by sequential addition of amino acids, and activated esters of each amino acid were generated by the addition of 1.9 mmol (3.8 mL of a 0.5 M solution) of 3-(Diethoxy-phosphoryloxy)-3H-benzo[d][1,2,3]triazin-4-one (DEPBT) in DMF to a cartridge containing 2 mmol of Boc protected amino acid. The amino acids were dissolved by bubbling nitrogen gas through the cartridge. One mL of N,N-Diisopropylethylamine was added to the cartridge to effect ester formation. This solution was transferred to the reaction vessel containing the 0.2 mmol of the C-terminal residue attached to the PAM resin, vortexed several times, and allowed to couple to the resin for 10 minutes. After washing to remove the unreacted reagents, the N-terminal Boc protecting group was removed by treatment with trifluoroacetic acid (TFA) for 5 minutes. The resin was washed with DMF and the cycle was repeated for the desired number of steps until the chain was assembled. The reaction vessel at the end of the synthesis (typically 30 amino acids) contained approximately 1.2-1.5 g of protected peptidyl-PAM resin. The resin was washed numerous times with dimethylformamide (DMF), treated with trifluoroacetic acid to remove the last t-Boc protecting group and finally washed several additional times with DMF, dichloromethane (DCM) and dried.

[1243] The peptidyl-resin was treated with anhydrous HF (procedure detailed later in this section), and this typically yielded approximately 350 mg (about 50% yield) of a crude deprotected-peptide.

[1244] Peptide Synthesis (Fmoc Amino Acids/HF Cleavage):

[1245] This synthesis scheme was performed manually with a few amino acids at selective sites. In this work, the Fmoc amino acids were used only to synthesize internal serine prodrugs, as a part of a wider synthetic strategy. Here, it is to be noted that although Fmoc chemistry has been used in the synthesis, the peptides have always been built on PAM resin that required treatment with HF to cleave the peptide from the solid support. The yield of these peptides is approximately as stated earlier for Boc/PAM synthesis.

[1246] The synthesis was carried out as described in the previous section. At the end of the coupling step, the peptidyl-resin was treated with 20% piperidine to remove the N-terminal Fmoc protecting group. It was washed repeatedly with DMF and this repetitive cycle was repeated for the desired number of coupling steps. The peptidyl-resin at the end of the entire synthesis was dried by using DCM, and the peptide was cleaved from the resin with anhydrous HF.

[1247] Depsi-Peptide Synthesis (Amino Ester Formation)

[1248] In this case, the peptidyl-resin had an α-hydroxyl-N terminal extension instead of a N-terminal amine and the acylation was done at the α-hydroxyl group. This reaction takes a longer time than that of the amide bond formation because the hydroxyl group is a weaker nucleophile as compared to the amine. The reaction time was typically 12 hours.

[1249] Initially, the activated esters of each amino acid were generated by the addition of 1 mmol (0.155 mL of Diisopropylcarbodiimide (DIC) to a cartridge containing a solution of 2 mmol of Boc protected amino acid residue in 2 mL DCM. This cartridge was cooled to 10° C. for 10 minutes and 0.9 mmol (244 mg) of dimethylaminopyridine (DMAP) was added to the cartridge to accelerate ester formation. This mixture was transferred to the reaction vessel containing the peptidyl-resin upon which the peptide was synthesized. The reaction vessel was stirred for 12 hours.

[1250] The peptidyl-resin was dried using DCM and the synthesis of the desired peptide was continued. The peptidyl-resin at the end of the entire synthesis was dried by using DCM, and finally treated with anhydrous HF to generate the desired peptide.

[1251] N-Terminal Hydroxyl Peptide Synthesis (α-Hydroxyl-N Terminal Extension)

[1252] In this reaction, the free amine of the peptidyl-resin reacts with an α-hydroxyl acid to form an α-hydroxyl-N terminal extension. In this regard, two such α-hydroxyl acids were used namely, glycolic acid (OH-glycine) and phenyllacetic acid (OH-phenylalanine). These syntheses were also performed manually. The peptides were constructed by addition of the α-hydroxyl acid, and activated esters of the α-hydroxyl acid were generated by the addition of 0.9 mmol of DEPBT (270 mg) to a cartridge containing a solution of 1 mmol of Boc protected residue in 2 mL DMF. DIEA (N,N-Diisopropylethylamine, 0.5 mL) was added to the cartridge to accelerate ester formation. This mixture was transferred to the reaction vessel containing the peptidyl-resin upon which the peptide was synthesized. The reaction time was 6 hours.

[1253] The peptidyl-resin was dried using DCM and the synthesis of the desired peptide was continued. The peptidyl-resin at the end of the entire synthesis was dried by using DCM, and cleaved by anhydrous HF to generate the free peptide.

[1254] HF Treatment of the Peptidyl-Resin

[1255] The peptidyl-resin (30 mg to 200 mg) was placed in the hydrogen fluoride (HF) reaction vessel for cleavage. 500 μL of p-cresol was added to the vessel as a carbonium ion scavenger. The vessel was attached to the HF system and submerged in a methanol/dry ice mixture. The vessel was evacuated with a vacuum pump and 10 mL of HF was distilled to the reaction vessel. This reaction mixture of the peptidyl-resin and the HF was stirred for one hour at 0° C., after which a vacuum was established and the HF was quickly evacuated (10-15 min). The vessel was removed carefully and filled with approximately 35 mL of ether to precipitate the peptide and to extract the p-cresol and small molecule organic protecting groups resulting from HF treatment. This mixture was filtered utilizing a teflon filter and repeated twice to remove all excess cresol. This filtrate was discarded. The precipitated peptide dissolved in approximately 20 mL of 10% acetic acid (aq). This filtrate, which contained the desired peptide, was collected and lyophilized.

[1256] Analysis Using Mass Spectrometry

[1257] The mass spectra were obtained using a Sciex API-III electrospray quadrapole mass spectrometer with a standard ESI ion source. Ionization conditions that were used are as follows: ESI in the positive-ion mode; ion spray voltage, 3.9 kV; orifice potential, 60 V. The nebulizing and curtain gas used was nitrogen with a flow rate of 0.9 L/min. Mass spectra were recorded from 600-1800 Thompsons at 0.5 Th per step and 2 msec dwell time. The sample (about 1 mg/mL) was dissolved in 50% aqueous acetonitrile with 1% acetic acid and introduced by an external syringe pump at the rate of 5 μL/min.

[1258] When the peptides were analyzed in PBS solution by ESI-MS, they were first desalted using a ZipTip solid phase extraction tip containing 0.6 μL C4 resin, according to instructions provided by the manufacturer (Millipore Corporation, Billerica, Mass., see the Millipore website of the world wide web at millipore.com/catalogue.nsf/docs/C5737).

[1259] High Performance Liquid Chromatography (HPLC) Analysis:

[1260] Preliminary analyses were performed with these crude peptides for an approximation of their relative conversion rates in Phosphate Buffered Saline (PBS) buffer (pH, 7.2) using high performance liquid chromatography (HPLC) and MALDI analysis. The crude peptide samples were dissolved in the PBS buffer at a concentration of 1 mg/mL. One mL of the resulting solution was stored in a 1.5 mL HPLC vial, which was then sealed and incubated at 37° C. Aliquots of 100 μL were drawn out at various time intervals, cooled to room temperature and analyzed by HPLC.

[1261] The HPLC analyses were performed using a Beckman System Gold Chromatography system using a UV detector at 214 nm. HPLC analyses were performed on a 150 mm×4.6 mm C18 Vydac column. The flow rate was 1 mL/min. Solvent A contained 0.1% TFA in distilled water, and solvent B contained 0.1% TFA in 90% CH₃CN. A linear gradient was employed (40% to 70% B in 15 minutes). The data were collected and analyzed using Peak Simple Chromatography software.

[1262] The initial rates of hydrolysis were used to measure the rate constant for the dissociation of the respective prodrugs. The concentrations of the prodrug and the drug were estimated from their peak areas respectively. The first order dissociation rate constants of the prodrugs were determined by plotting the logarithm of the concentration of the prodrug at various time intervals. The slope of this plot gives the rate constant 1′. The half lives of the degradation of the various prodrugs were then calculated by using the formula t_{1/2}=0.693/k.

[1263] Preparative Purification Using HPLC:

[1264] Once a prodrug displaying an appropriate t_{1/2} was identified, the prodrug was purified. The purification was performed using HPLC analysis on a silica based 1×25 cm Vydac C18 (5μ particle size, 300 A° pore size) column. The instruments used were: Waters Associates model 600 pump, Injector model 717, and UV detector model 486. A wavelength of 214 nm was used for all samples. Solvent A contained 10% CH₃CN/0.1% TFA in distilled water, and solvent B contained 0.1% TFA in CH₃CN. A linear gradient was employed (0 to 100% B in 2 hours). The flow rate was 1.2 mL/min and the fraction size was 6 mL. From about 350 mg of crude peptide, 80 mg of the pure peptide (about 23% yield) was typically obtained.

### Example 5

### Bioassay Experimental Design: Luciferase-Based Reporter Gene Assay for Camp Detection

[1265] The ability of each glucagon and GLP-1 analog or prodrug to induce cAMP was measured in a firefly luciferase-based reporter assay. The cAMP production that is induced is directly proportional to the glucagon or GLP-1 binding to its receptor. HEK293 cells co-transfected with the glucagon or GLP-1 receptor, respectively, and luciferase gene linked to a cAMP responsive element were employed for the bioassay.

[1266] The cells were serum-deprived by culturing 16 hours in Dulbecco Minimum Essential Medium (Invitrogen, Carlsbad, Calif.) supplemented with 0.25% Bovine Growth Serum (HyClone, Logan, Utah) and then incubated with serial dilutions of either GLP-1 analogs or prodrugs for 5 hours at 37° C., 5% CO₂ in 96 well poly-D-Lysine-coated “Biocoat” plates (BD Biosciences, San Jose, Calif.). At the end of the incubation, 100 μL of LucLite luminescence substrate reagent (Perkin Elmer, Wellesley, Mass.) were added to each well. The plate was shaken briefly, incubated 10 min in the dark and light output was measured on MicroBeta-1450 liquid scintillation counter (Perkin-Elmer, Wellesley, Mass.). The effective 50% concentrations (EC₅₀) were calculated by using Origin software (OriginLab, Northampton, Mass.).

### Example 6

### Bioactivity of Glucagon Related Peptide Amide-Based Prodrugs

[1267] I) GLP-1

[1268] The C²⁴ GLP-1(7-36) peptide (HAEGTFTSDVSSYLEGQAAKEFICWLVKGR; SEQ ID NO: 717) was assembled on a peptide synthesizer. To confirm that a feasible extended N-terminus could be used for the prodrug modification, a small percentage of peptide bound resin was cleaved by HF to check the validity of the synthesis. The synthesized peptide has a mass of 3329.8 Daltons. The receptor binding activity of GLP-1 was determined in the GLP-1-receptor Luciferase assay described in Example 5.

[1269] II) Adding Dipeptides to the N Terminus of GLP

[1270] Dipeptides were covalently attached to the N-terminus of glucagon or GLP-1 to study differential tendencies for intramolecular cyclization and cleavage through diketopiperazine (DKP) formation.

[1271] The biologically inactive dipeptide-extended GLP-1 and glucagon analogs were converted to the active peptide drug upon cleavage of the amide bond along with formation of DKP. The same conversion can be performed with either sarcosine (Sar) or proline as amino acid ‘B’ in the A-B dipeptide of GLP-1 analogs. Prodrugs of varying half lives were envisioned by chemically modifying the substituents on the alpha carbons of the first (A) and second (B) amino acids of the dipeptide of Formula I. For example, a dipeptide prodrug element comprising proline and amino-isobutyric acid (Aib) were successively introduced to the C²⁴ GLP (SEQ ID NO: 717), so the first peptide was named Aib⁻¹-P⁰,C²⁴GLP(7-36) where the first amino acid (amino acid “Xaa⁻¹”) of the peptide is amino-isobutyric acid and the second amino acid (amino acid “Xaa⁰”) is proline. All peptides mentioned hereafter will have the same systematic nomenclature. The stereochemistry for each synthesized compound is the L-isomer unless otherwise stated, when amino acids are designated with a superscript position number following the three letter amino acid code. The peptide was prepared synthetically by solid phase synthesis as described earlier. The synthesis was confirmed by ESI-MS analysis (3479.9 Da).

[1272] III) GLP-Prodrug Pegylation

[1273] Pegylation is a useful method to protect peptides and decrease clearance of the peptide by the kidneys. Accordingly, for the following experiments the prodrug Aib⁻¹-P⁰,C²⁴GLP(7-36) was pegylated by maleimido-functioned 40 k Da PEG on the —SH group of the 24-Cys of the Aib⁻¹-P⁰,C²⁴GLP(7-36) through a Michael reaction. The pegylated glucagon related peptide was named 40 k PEG-Aib⁻¹-P⁰,C²⁴GLP(7-36). This pegylated peptide was purified by preparative HPLC and confirmed by MALDI-TOF-MS (44000-46000, broad peak).

[1274] IV) GLP-1 Activity in PBS

[1275] To explore the possible formation of DKP and simultaneous regeneration of the parent drug, 40 k PEG-Aib⁻¹P⁰,C²⁴GLP(7-36) was incubated in PBS buffer at 37° C. for approximately 10 days. Samples were collected at different time points (30 h, 54 h, 168 h, 240 h). To investigate the restored activity of GLP-1 after cleavage of the dipeptide prodrug through DKP formation, all the collected samples were analyzed using a bioassay. More particularly, the receptor binding activity of GLP prodrugs were determined in the GLP-receptor Luciferase assay described in Example 5.

TABLE 5
Bioassay data at different time point of 40 k PEG- Aib⁻¹ -P⁰,
C²⁴GLP(7-36) in PBS

| | | GLP- | GLP- | GLP- | GLP- |
|---|---|---|---|---|---|
| | GLP- | pro- | pro- | pro- | pro- |
| | STD | 30 h | 54 h | 168 h | 240 h |
| EC_{50%} | 0.20902 | 1.2079 | 0.75357 | 0.37388 | 0.31436 |
| EC_{50%}/STD | 1 | 17.31% | 27.74% | 55.90% | 66.49% |
| ratio | | | | | |

[1276] The half life of the degradation of the parent drug 40 k PEG-Aib⁻¹-P⁰,C²⁴GLP(7-36) in plasma was then calculated by using the formula t_{1/2}=0.693/k and determined to be 140 h.

[1277] V) GLP-1 Activity in Plasma

[1278] To explore the possible formation of DKP and simultaneous regeneration of the parent drug, dLys⁻¹-Sar⁰,C²⁴GLP(7-36) was incubated in plasma at 37° C. for approximately 30 h. Samples were collected at different time point (1 h, 12 h, 30 h). To investigate the restored activity after cleavage of the dipeptide from GLP-1 through DKP formation, all the collected samples were analyzed using a bioassay. More particularly, the receptor binding activity of GLP prodrugs were determined in the GLP-receptor Luciferase assay described in Example 5.

TABLE 6
Bioassay data at different time point of dLys⁻¹ -Sar⁰,
C²⁴GLP(7-36) in plasma

| | GLP- | GLP- | GLP- | GLP- |
|---|---|---|---|---|
| | STD | pro-1 h | pro-10 h | pro-30 h |
| EC50% | 0.20939 | 0.13933 | 0.03948 | 0.0233 |
| EC_{50%}/STD | 1 | 14.63% | 51.75% | 87.51% |
| ratio | | | | |

[1279] The half life of the degradation of the parent drug, dLys⁻¹-Sar⁰,C²⁴GLP(7-36) in plasma was then calculated by using the formula t_{1/2}=0.693/k and determined to be about 10 h.

### Example 7

### In Vivo Effects of Glucagon Superfamily Peptide Prodrugs in Mice

[1280] Diet-induced obesity (DIO) mice are injected intraperitoneally with a single weekly dose of a glucagon superfamily peptide (SEQ ID NOs: 1-684, 1701-1776, 1801-1921). Mice are weighed daily (N=8) after the initial injection with the following: vehicle only or a glucagon superfamily peptide, at about 0.5 nmol/kg, 3 nmol/kg, 10 nmol/kg, 15 nmol/kg, or 70 nmol/kg, or a prodrug derivative of the glucagon superfamily peptide wherein a dipeptide is linked to the N-terminus of glucagon superfamily peptide via an amide bond wherein the dipeptide is Aib⁻¹ Pro⁰, Aib⁻¹ dPro⁰, Lys⁻¹ Sar⁰, dAla⁻¹ Pro⁰, Ac-Aib⁻¹Pro⁰, Lys⁻¹(X) Sar⁰ (X representing a 1 K PEG chain linked to the Lys side chain), Lys⁻¹(Y) Sar⁰ (Y representing a tert-butyl glycine linked to the Lys side chain), dLys⁻¹ Sar⁰, dLys⁻¹Gly(N-Hexyl)⁰, or dLys⁻¹ F(N-Me)⁰ (administered at about 0.5 nmol/kg, 3 nmol/kg, 10 nmol/kg, 15 nmol/kg or 70 nmol/kg).

[1281] A saline solution comprising 25% (v/v) glucose is injected at a dose of 1.5 g/kg of body weight at the 0 min time point. Blood glucose levels are measured at the −60, 0, 15, 30, 60, and 120 min time points. Body weight, food intake, blood glucose and body composition are measured on days 0 and 1.

### Example 8

### Weight Loss Induced in Mice Administered Glucagon Analogs

[1282] Diet-induced obesity (DIO) mice were injected intraperitoneally with a single weekly dose of 15 or 70 nmol/kg of a glucagon analog. Mice were weighed daily (N=8) after the initial injection with the following: vehicle only ▾, Glucagon Superfamily Peptide A (“Peptide A”) at 15 nmol/kg ( [symbol] ) or 70 nmol/kg ( [symbol] ), or a prodrug derivative of Peptide A wherein a dipeptide is linked to the N-terminus of Peptide A via an amide bond wherein the dipeptide is Aib⁻¹ Pro⁰ (adminstered at 15 nmol/kg (◯) or 70 nmol/kg ()), Aib⁻¹ dPro⁰ (adminstered at 70 nmol/kg (⋄)), Lys⁻¹ Sar⁰ (adminstered at 70 nmol/kg (♦)), dAla⁻¹ Pro⁰ (adminstered at 70 nmol/kg ( [symbol] )) or Ac-Aib⁻¹ Pro⁰ (administered at 70 nmol/kg (▪)). Results of the experiment are shown in FIG. 1. Note the compound Ac-Aib⁻¹ Pro⁰ Peptide A is incapable of cleaving to form a diketopiperazine, yet the compound shows some level of activity beyond that seen for vehicle. This is presumably due to low residual activity of the prodrug. Peptide A is a pegylated analog of glucagon comprising 7 substitutions relative to native glucagon (SEQ ID NO: 701), a C-terminal amide, and pegylation with a maleimide-functionalized 40 k Da PEG.

[1283] FIG. 2 is a graph showing the change in body weight in diet-induced obesity (DIO) mice injected intraperitoneally with a single weekly dose of 0.5, 3, 15 or 70 nmol/kg of either vehicle only (♦), Peptide A, (at 0.5▴, 3 [symbol] , 15▾ or 70 [symbol] nmol/kg/day) or Lys⁻¹ Sar⁰ Peptide A, (at 0.5Δ, 3 [symbol] , 15∇ or 70 [symbol] nmol/kg/day). At all doses the two drugs appear to be producing a similar effect and thus the benefit from the addition of the dipeptide prodrug element appears to be minimal. This is likely due to enzymatic cleavage of the dipeptide and rapid activation of the administered prodrug.

### Example 9

### Glucose Tolerance Test using Glucagon Prodrug Analogs

[1284] Diet-induced obesity (DIO) mice (N=8) were injected intraperitoneally with a 15 or 70 nmol/kg dose of one of the following:

[1285] (A) Peptide A, (at 15 [symbol] or 70 [symbol] nmol/kg/day),

[1286] (B) Lys⁻¹ Sar⁰ Peptide A, (at 15 [symbol] or 70 [symbol] nmol/kg/day), or

[1287] (C) dLys⁻¹ Sar⁰ Peptide A, (at 15□, or 70▪nmol/kg/day).

[1288] A saline solution comprising 25% (v/v) glucose was injected at a dose of 1.5 g/kg of body weight at the 0 min time point. Blood glucose levels were measured at the −60, 0, 15, 30, 60, and 120 min time points. FIG. 3 presents the data from this experiment.

[1289] FIG. 4 is a graph of blood glucose levels (mg/dL) in DIO mice (N=8) injected intraperitoneally at the −15 min time point with either vehicle only (▾) or 2 nmol/kg dose of one of the following compounds:

[1290] (A) Lys⁻¹ Sar⁰ Peptide A (▪),

[1291] (B) Lys⁻¹(X), Sar⁰ Peptide A (▴), (X representing a 1 K PEG chain linked to the Lys side chain)

[1292] (C) Lys⁻¹(Y), Sar⁰ Peptide A (♦), (Y representing a tert-butyl glycine linked to the Lys side chain)

[1293] (D) dLys⁻¹ Sar⁰ Peptide A, ( [symbol] ).

[1294] A saline solution comprising 25% (v/v) glucose was injected at a dose of 1.5 g/kg of body weight at the 0 min time point. Blood glucose levels were measured at the −15, 0, 15, 30, 60, and 120 min time points.

[1295] FIG. 5 is a graph of blood glucose levels (mg/dL) in DIO mice (N=8) injected first with a glucagon related peptide and then a glucose solution. Mice were injected intraperitoneally at the −15 min time point with either vehicle (▾), a 20 nmol/kg dose for dLys⁻¹ Sar⁰ Peptide A ( [symbol] ), or a 0.67 nmol/kg dose of one of the following compounds:

[1296] (A) Lys⁻¹ Sar⁰ Peptide A (▪),

[1297] (B) Lys⁻¹(X), Sar⁰ Peptide A (▴), (X representing a 1 K PEG chain linked to the Lys side chain)

[1298] (C) Lys⁻¹(Y), Sar⁰ Peptide A (♦), (Y representing a tert-butyl glycine linked to the Lys side chain).

[1299] The data from FIGS. 3-5 indicate that the Lys⁻¹, Sar⁰ dipeptide fails to act like a prodrug element when linked to the N-terminus. However modifying the amino acids of the dipeptide, particularly the substitution of D-amino acid (dLys⁻¹) keeps the compound inactive (presumably by preventing enzymatic cleavage). The prodrug will then be activated based on the structure and stereochemistry of the dipeptide prodrug element and the strength of the nucleophile. As shown in FIG. 5, even at a much higher dose (20 nmol/kg dose vs 0.67 nmol/kg dose) the dLys⁻¹ Sar⁰ Peptide A provides a prodrug effect.

### Example 10

[1300] Diet-induced obesity (DIO) mice (N=8) were injected intraperitoneally with a 15 or 70 nmol/kg dose of one of the following compounds:

[1301] (A) Peptide A, (at 15Δ or 70▴nmol/kg/day),

[1302] (B) dLys⁻¹ Sar⁰ Peptide A, (at 15□, or 70▪nmol/kg/day), or

[1303] (C) Lys⁻¹ Sar⁰ Peptide A, (at 15 [symbol] or 70 [symbol] nmol/kg/day). at the −60 min time point. At 0 min and at 24 hr, 25% glucose in saline was injected intraperitoneally at a dose of 1.5 g per kg of body weight. Blood glucose levels were measured at the −60, 0, 15, 30, 60 and 120 time points. Body weight, food intake, blood glucose and body composition were measured on days 0 and 1, with N=8 DIO mice per group with an initial average body weight of 55 g. FIG. 6 is a graph of the blood glucose levels (mg/dL) in DIO mice (N=8) injected intraperitoneally at the −60 min time point with either vehicle only (▾) or 15 or 70 nmol/kg dose of the compounds described above.

[1304] A saline solution comprising 25% (v/v) glucose was injected at a dose of 1.5 g/kg of body weight at the 0 min time point and 24 hours later. Indicated blood glucose levels were measured at the −60, 0, 15, 30, 60, and 120 min time points relative to the first administration of the glucose solution (i.e., the 0 min time point).

[1305] FIG. 7 is a graph of blood glucose levels (mg/dL) in DIO mice (N=8) injected intraperitoneally at the −60 min time point with either vehicle only (▾) or 15 or 70 nmol/kg dose of one of the following compounds:

[1306] (A) Peptide A, (at 15Δ or 70▴nmol/kg/day),

[1307] (B) dLys⁻¹ Sar⁰ Peptide A, (at 15⋄ or 70∇nmol/kg/day), or

[1308] (C) Lys⁻¹ Sar⁰ Peptide A, (at 15♦, or 70▪nmol/kg/day).

[1309] A saline solution comprising 25% (v/v) glucose was injected at a dose of 1.5 g/kg of body weight at the 0 min time point and 24 hours later. Indicated blood glucose levels were measured at the 0, 15, 30, 60, and 120 min time points relative to the 24 hour administration of the second glucose solution.

[1310] FIG. 8 shows weight loss in DIO mice (N=8) injected intraperitoneally with the indicated compounds at either a 15 or 70 nmol/kg dose. The indicated body weights were determined 7 days after administration of the compounds.

### Example 11

[1311] Diet-induced obesity (DIO) mice (N=8) were injected intraperitoneally with vehicle alone or a 15 nmol/kg dose of prodrug peptide 24, 8, 4 or 1 hour prior to glucose challenge with an injection of 25% glucose in saline at 1.5 g/kg of body weight. Indicated blood glucose levels were measured at the 0, 15, 30, 60, and 120 min time points relative to the challenge with glucose solution. Results of the study are illustrated in FIG. 9, and indicate that both Lys⁻¹ Sar⁰ Peptide A (FIG. 9A) and dLys⁻¹ Sar⁰ Peptide A (FIG. 9B) reduce blood glucose elevation relative to vehicle control. A comparison between the results from the two prodrugs indicates the difference between the effectiveness of initial blood glucose control relative the time period that the prodrug has been circulating. In mice administered the “d” stereoisomer initial control of blood glucose (i.e., early time point) was poor when the prodrug was administered one hour prior to challenge and better when administered well before challenge (e.g., the greatest initial control was when prodrug 8 and 24 hour time points). This study supports the conclusion that the prodrugs comprising the “d” stereoisomer remain in an inactive form for a longer time period than prodrugs comprising a “1” stereoisomer.

### Example 12

[1312] Three prodrugs of Glucagon Superfamily Peptide B (“Peptide B”) and Glucagon Superfamily Peptide C (“Peptide C”) were synthesized according to the following procedures:
[1313] 1) dK-Sar-Peptide C, wherein dK is the D isoform of Lys, Sar is sarcosine, and Peptide C is an analog of glucagon comprising 8 substitutions relative to native glucagon (SEQ ID NO: 701), a C-terminal amide, and pegylation with an iodoacetyl-functioned 40 k Da PEG.
[1314] The peptide sequence was assembled using solid-phase peptide synthesis. After the coupling and deprotection of the last residue His, the peptide bound resin was reacted with 5-fold excess Boc-sarcosine, DEPBT and DIEA in DMF, at room temperature for 6 h. The reaction was monitored by the nihydrin test. After completion of the coupling, the resin was washed 3 times with DMF and DCM, accordingly. The Boc protection was removed by TFA. The resin was washed by DCM, DMF and neutralized by DIEA. The resin-bound peptide was further reacted with 5-fold Boc-dLys, DEPBT and DIEA, at room temperature overnight. The resin was then treated by TFA to remove the Boc protection and washed by DCM, DMF. Finally, the resin was treated with 20% piperidine in DMF to remove to formyl group on ²⁵Trp and dried under vacuum. The peptide was eventually cleaved by reaction with HF at 4° C. for 1 hour and precipitated by anhydrous ethyl ether. After filtration, the peptide was taken up by 20% acetonitrile (MeCN) in water and lyophilized to powder. The peptide was purified by preparative HPLC (C5 column; flow rate 10 ml/min; Buffer A 10% MeCN and 0.1% TFA in water; Buffer B: 0.1% TFA in ACN; A linear gradient B % from 0-40% (0-80 min)). The compound was verified by ESI-MS (3612.8 Daltons).

[1315] The resulting peptide was PEGylated by iodoacetyl-functioned 40 k Da PEG on the thiol group of 24-Cys. The peptide was dissolved in 4 M urea/50 nM Tris buffer (pH 6.6) at 4° C., overnight. The PEGylated peptide was purified by preparative HPLC and the identity confirmed by MALDI-TOF-MS (44000-46000, broad peak)
[1316] 2) dK-Gly(N-Hexyl)-Peptide B, wherein dK is the D-isoform of Lys, Gly(N-Hexyl) is N-hexyl-Glycine, and Peptide B is an analog of glucagon comprising 8 substitutions relative to native glucagon (SEQ ID NO: 701), a C-terminal amide, and pegylation with a maleimide-functionalized 40 k Da PEG.
   The peptide sequence was assembled using solid-phase peptide synthesis. The peptide bound resin was reacted with 5-fold excess bromoacetic acid, DIC and HOBT in DMF, at room temperature for 2 h. After a negative nihydrin test result was shown, the resin was washed 3 times with DMF and DCM, accordingly. Then the resin was reacted with 10-fold excess n-hexylamine and DIEA in DMF, at room temperature overnight. The resin-bound peptide was further reacted with 5-fold Boc-dLys, DEPBT and DIEA, at room temperature overnight. The resin was then washed 3-times with DMF and DCM. The resin-bound peptide was further reacted with 5-fold Boc-dLys, DEPBT and DIEA, at room temperature for 24 h. The resin was treated with TFA to remove the Boc protection and washed by DCM and DMF. Finally, the resin was treated with 20% piperidine in DMF to remove the formyl group on ²⁵Trp and dried under vacuum. The peptide was eventually cleaved by reaction with HF at 4° C. for 1 hour, and precipitated using anhydrous ethyl ether. After filtration the peptide was redissolved using 20% MeCN in water and lyophilized to powder. The peptide was purified by preparative HPLC(C5 column; flow rate 10 ml/min; A buffer 10% MeCN and 0.1% TFA in water; B buffer 0.1% TFA in MeCN; A linear gradient B % from 0-40% (0-80 min)). The compound was verified by ESI-MS and had a mass of 3677.0 Daltons.

[1317] The resulting peptide was PEGylated with maleimide-functioned 40 k Da PEG on the thiol group of 24-Cys. The peptide was dissolved in 4 M urea/50 nM Tris buffer (pH 6.6) at 4° C., overnight. The PEGylated peptide was purified by preparative HPLC and the identity confirmed by MALDI-TOF-MS (44000-46000, broad peak).
[1318] 3) dK-F(N-Me)-Peptide C, wherein dK is the D-isoform of Lys, F(N-Me) is N-methyl-Phe, and Peptide C is an analog of glucagon comprising 8 substitutions relative to native glucagon (SEQ ID NO: 701), a C-terminal amide, and pegylation with an iodoacetyl-functioned 40 kDa PEG. The peptide sequence was assembled using solid-phase peptide synthesis. The peptide bound resin was reacted with 5-fold excess of N-methyl phenyl alanine, DEPBT and DIEA in DMF, at room temperature for 6 h. After a negative nihydrin test result was shown, the resin was washed 3 times with DMF and DCM, accordingly. The resin was then treated with TFA to remove the Boc protection, washed with DCM and DMF, and neutralized by DIEA. The resin-bound peptide was further reacted with 5-fold Boc-dLys, DEPBT and DIEA, at room temperature overnight. The resin was then treated with TFA to remove the Boc protection and washed with DCM and DMF. Finally, the resin was treated with 20% piperidine in DMF to remove to formyl group on ²⁵Trp and dried under vacuum. The peptide was eventually cleaved using HF at 4° C. for 1 hour and precipitated by anhydrous ethyl ether. After filtration the peptide was redissolved using 20% MeCN
   in water and lyophilized to powder. The peptide was purified by preparative HPLC. HPLC conditions: C5 column; flow rate 10 ml/min; A buffer 10% MeCN and 0.1% TFA in water; B buffer 0.1% TFA in MeCN; A linear gradient B % from 0-40% (0-80 min); PEG-insulin or analogues was collected at approximately 33% B. The desired compound was verified by ESI-MS and had a mass of 3701.0 Daltons.

[1319] The resulting peptide was PEGylated by iodoacetyl-functioned 40 k Da PEG on the thiol group of 24-Cys. The peptide was dissolved in 4 M urea/50 nM Tris buffer (pH 6.6) at 4° C., overnight. The PEGylated peptide was purified by preparative HPLC and the identity confirmed by MALDI-TOF-MS (44000-46000, broad peak).

[1320] Similar procedures are used to synthesize prodrugs comprising dLys-N-Methyl-Glycine, dLys-N-Hexyl-Glycine, and dLys-N-Methyl-Phenylalanine linked to any of SEQ ID NOs: 1-684, 701-731, 801-919, 1001-1262, 1301-1371, 1401-1518, 1701-1776, and 1801-1921.

### Example 13

[1321] The three prodrugs described in Example 12 were tested for their in vivo effects in diet induced obesity (DIO) mice (strain: C57B16). Nine groups of eight mice (with an initial average body weight of 44.5 g) were subcutaneously injected with vehicle only or 10 nmol/kg of a prodrug peptide of Example 12 or the parent peptide (non-prodrug form lacking a dipeptide prodrug moiety). The mice were 5.5 months old and had been on a high fat diet for approximately 2 months. Blood glucose levels were taken at 0, 2, 4, 24, and 72 hours post injection (FIG. 11). Body weight was monitored for a week following injection and was measured on Day 0, 1, 3, 5, and 7, wherein Day 0 was the day of injection (FIG. 12). Food intake and fat mass were also monitored during the week long study.

[1322] The body weight of the mice receiving the parent peptide, the dK-Sar-containing prodrug, or the dK-Gly(N-Hexyl) prodrug steadily declined over the course of the study, as compared to the mice receiving a vehicle control. As expected, the parent peptide achieved the greatest decrease in body weight, suggesting that the prodrugs administered at higher doses may achieve the same effects as the parent peptide.

[1323] The change in blood glucose levels (Day 7-Day 0 levels) were greatest for the parent peptide, although the dK-Sar and dK-Gly(N-Hexyl) prodrugs also produced substantial decreases, as compared to vehicle control.

### Example 14

[1324] The rate of DKP formation was modulated by the substitution of the side chain and/or alpha-amine of amino acid ‘B’ of the dipeptide prodrug A-B. Table 7 shows the rate of DKP formation using the dK-Sar and dK-Gly(N-Hexyl), dK-F(N-Me) prodrugs from Example 12.

TABLE 7
Modulation of DKP Formation Rate
dK-B-Glucagon Superfamily Peptide

| Amino Acid “B” of the Dipeptide | | Glucagon Superfamily |
|---|---|---|
| Prodrug | t_{1/2} (h) | Peptide |
| Gly-N(Me) | 27 | Peptide C |
| Gly-N(Hexyl) | 14 | Peptide B |
| Phe-N(Me) | 60 | Peptide C |

### Example 15

[1325] The receptor binding activity of the following peptides and prodrugs in 20% human plasma were determined over time using the GLP-receptor Luciferase assay described in Example 5:

[1326] (A) GLP-1 (SEQ ID NO: 703),

[1327] (B) Peptide C,

[1328] (C) dLys⁻¹ Sar⁰ Chimera Peptide C, or

[1329] (D) dLys⁻¹ Gly(N-Hexyl)° Peptide B.

As shown in Table 8, the activities of the dLys⁻¹ Sar⁰ and dLys⁻¹ Gly(N-Hexyl)⁰ prodrugs gradually increased over time and matched native GLP-1 within 48 hours (FIGS. 13A and 13B).

TABLE 8
Effect of Time on Conversion of Prodrug to Active Drug

| | 0 h* | 24 h | 48 h | 72 h |
|---|---|---|---|---|
| Peptide C | 100% | 77.3% | 77.3% | 81.0% |
| dLys⁻¹ Sar⁰ Peptide C | 5.7% | 104.5% | 287.5% | 246.4% |
| dLys⁻¹ Gly(N-Hexyl)⁰ | 21.1% | 122.0% | 277.2% | 254.1% |
| Peptide B | | | | |

*5 hour incubation assay

### Example 16

[1330] Lean, diet-induced obesity mice (N=14, strain: C57B16 WT)) were injected subcutaneously with a single weekly dose of 3, 10, or 30 nmol/kg of vehicle or one of the following compounds:

[1331] (A) Peptide C,

[1332] (B) dLys⁻¹ Sar⁰ Peptide C, or

[1333] (C) dLys⁻¹ Gly(N-Hexyl)° Peptide B.

The mice had an average initial body weight of 31.2 g and were weighed on days 1, 3, 5, and 7. Blood glucose levels were taken intraperitoneally on days 1, 3, and 5. The mice were approximately 5 months old and were fed a regular chow diet for approximately 5 months.

[1334] Results of study are shown in FIGS. 14-15. FIG. 14 depicts a graph showing the change in body weight of the DIO mice on days 1, 3, 5, and 7. FIG. 15 depict graphs showing the blood glucose levels on day 1 (FIG. 15A), day 3 (FIG. 15B), and day 5 (FIG. 15C).

1. A prodrug comprising the structure:
A-B-Q;
wherein Q is a glucagon superfamily peptide;
A is an amino acid or a hydroxy acid;
B is an N-alkylated amino acid linked to Q through an amide bond between A-B and an amine of Q;
wherein A, B, or the amino acid of Q to which A-B is linked is a non-coded amino acid, further wherein chemical cleavage half-life (t_{1/2}) of A-B from Q is at least about 1 hour to about 1 week in PBS under physiological conditions.

2. The prodrug of claim 1, wherein the cleavage half-life of A-B from Q in PBS under physiological conditions, is not more than two fold the cleavage half-life of A-B from Q in a solution comprising a DPP-IV protease, wherein the solution comprising a DPP-IV protease is serum.

3. (canceled)

4. The prodrug of claim 1, wherein A-B comprises the structure: [chemical structure]
wherein
(i) R₁, R₂, R₄ and R₈ are independently selected from the group consisting of H, C₁-C₁₈ alkyl, C₂-C₁₈ alkenyl, (C₁-C₁₈ alkyl)OH, (C₁-C₁₈ alkyl)SH, (C₂-C₃ alkyl)SCH₃, (C₁-C₄ alkyl)CONH₂, (C₁-C₄ alkyl)COOH, (C₁-C₄ alkyl)NH₂, (C₁-C₄ alkyl)NHC(NH₂⁺)NH₂, (C₀-C₄ alkyl)(C₃-C₆ cycloalkyl), (C₀-C₄ alkyl)(C₂-C₅ heterocyclic), (C₀-C₄ alkyl)(C₆-C₁₀ aryl)R₇, (C₁-C₄ alkyl)(C₃-C₉ heteroaryl), and C₁-C₁₂ alkyl(W₁)C₁-C₁₂ alkyl, wherein W₁ is a heteroatom selected from the group consisting of N, S and O, or R₁ and R₂ together with the atoms to which they are attached form a C₃-C₁₂ cycloalkyl or aryl; or R₄ and R₈ together with the atoms to which they are attached form a C₃-C₆ cycloalkyl;
R₃ is selected from the group consisting of C₁-C₁₈ alkyl, (C₁-C₁₈ alkyl)OH, (C₁-C₁₈ alkyl)NH₂, (C₁-C₁₈ alkyl)SH, (C₀-C₄ alkyl)(C₃-C₆)cycloalkyl, (C₀-C₄ alkyl)(C₂-C₅ heterocyclic), (C₀-C₄ alkyl)(C₆-C₀ aryl)R₇, and (C₁-C₄ alkyl)(C₃-C₉ heteroaryl) or R₄ and R₃ together with the atoms to which they are attached form a 4, 5 or 6 member heterocyclic ring;
R₅ is NHR₆ or OH;
R₆ is H, C₁-C₈ alkyl or R₆ and R₂ together with the atoms to which they are attached form a 4, 5 or 6 member heterocyclic ring; and
R₇ is selected from the group consisting of H and OH, or
(ii) R₁, R₂, R₄ and R₈ are independently selected from the group consisting of H, C₁-C₁₈ alkyl, C₂-C₁₈ alkenyl, (C₁-C₁₈ alkyl)OH, (C₁-C₁₈ alkyl)SH, (C₂-C₃ alkyl)SCH₃, (C₁-C₄ alkyl)CONH₂, (C₁-C₄ alkyl)COOH, (C₁-C₄ alkyl)NH₂, (C₁-C₄ alkyl)NHC(NH₂⁺)NH₂, (C₀-C₄ alkyl)(C₃-C₆ cycloalkyl), (C₀-C₄ alkyl)(C₂-C₅ heterocyclic), (C₀-C₄ alkyl)(C₆-C₁₀ aryl)R₇, (C₁-C₄ alkyl)(C₃-C₉ heteroaryl), and C₁-C₁₂ alkyl(W₁)C₁-C₁₂ alkyl, wherein W₁ is a heteroatom selected from the group consisting of N, S and O, or R₁ and R₂ together with the atoms to which they are attached form a C₃-C₁₂ cycloalkyl; or R₄ and R₈ together with the atoms to which they are attached form a C₃-C₆ cycloalkyl;
R₃ is selected from the group consisting of C₁-C₁₈ alkyl, (C₁-C₁₈ alkyl)OH, (C₁-C₁₈ alkyl)NH₂(C₁-C₁₈ alkyl)SH, (C₀-C₄ alkyl)(C₃-C₆)cycloalkyl, (C₀-C₄ alkyl)(C₂-C₅ heterocyclic), C₀-C₄ alkyl)(C₆-C₁₀ aryl)R₇, and (C₁-C₄ alkyl)(C₃-C₉ heteroaryl) or R₄ and R₃ together with the atoms to which they are attached form a 4, 5 or 6 member heterocyclic ring;
R₅ is NHR₆ or OH;
R₆ is H C₁-C₈ alkyl or R₆ and R₂ together with the atoms to which they are attached form a 4, 5 or 6 member heterocyclic ring; and
R₇ is selected from the group consisting of hydrogen, C₁-C₁₈ alkyl, C₂-C₁₈ alkenyl, (C₀-C₄ alkyl)CONH₂, (C₀-C₄ alkyl)COOH, (C₀-C₄ alkyl)NH₂, (C₀-C₄ alkyl)OH, and halo.

5. (canceled)

6. The prodrug of claim 4, wherein the glucagon superfamily peptide is a glucagon related peptide.

7. The prodrug of claim 4 wherein
(i) R₁ and R₈ are independently H or C₁-C₈ alkyl;
R₂ and R₄ are independently selected from the group consisting of H, C₁-C₈ alkyl, C₂-C₈ alkenyl, (C₁-C₄ alkyl)OH, (C₁-C₄ alkyl)SH, (C₂-C₃ alkyl)SCH₃, (C₁-C₄ alkyl)CONH₂, (C₁-C₄ alkyl)COOH, (C₁-C₄ alkyl)NH₂, (C₁-C₄ alkyl)NHC(NH₂+) NH₂, (C₀-C₄ alkyl)(C₃-C₆ cycloalkyl), (C₀-C₄ alkyl)(C₂-C₅ heterocyclic), (C₀-C₄ alkyl)(C₆-C₁₀ aryl)R₇, and CH₂(C₃-C₉ heteroaryl), or R₁ and R₂ together with the atoms to which they are attached form a C₃-C₁₂ cycloalkyl or aryl;
R₅ is NHR₆; and
R₆ is H or C₁-C₈ alkyl, or
(ii) R₁ and R₈ are independently H or C₁-C₈ alkyl;
R₂ and R₄ are independently selected from the group consisting of H, C₁-C₈ alkyl, C₂-C₈ alkenyl, (C₁-C₄ alkyl)OH, (C₁-C₄ alkyl)SH, (C₂-C₃ alkyl)SCH₃, (C₁-C₄ alkyl)CONH₂, (C₁-C₄ alkyl)COOH, (C₁-C₄ alkyl)NH₂, (C₁-C₄ alkyl)NHC(NH₂+) NH₂, (C₀-C₄ alkyl)(C₃-C₆ cycloalkyl), (C₀-C₄ alkyl)(C₂-C₅ heterocyclic), (C₀-C₄ alkyl)(C₆-C₁₀ aryl)R₇, and CH₂(C₃-C₆ heteroaryl), or R₁ and R₂ together with the atoms to which they are attached form a C₃-C₁₂ cycloalkyl;
R₃ is C₁-C₁₈ alkyl;
R₅ is NHR₆;
R₆ is H or C₁-C₈ alkyl; and
R₇ is selected from the group consisting of hydrogen, C₁-C₁₈ alkyl, C₂-C₁₈ alkenyl, (C₀-C₄ alkyl)CONH₂ (C₀-C₄ alkyl)COOH, (C₀-C₄ alkyl)NH₂, (C₀-C₄ alkyl)OH, and halo.

8. (canceled)

9. The prodrug of claim 1, wherein said primary amine is the alpha amino group of the N-terminal amino acid of Q.

10. (canceled)

11. The prodrug of claim 9, wherein A-B comprises the structure: [chemical structure]
wherein
R₁ and R₂ are independently C₁-C₁₈ alkyl or aryl; or R₁ and R₂ are linked through —(CH₂)ₚ—, wherein p is 2-9;
R₃ is C₁-C₁₈ alkyl;
R₄ and R₈ are each hydrogen; and
R₅ is an amine, or
(ii) R₁ and R₂ are independently C₁-C₁₈ alkyl or (C₀-C₄ alkyl)(C₆-C₁₀ aryl)R₇; or R₁ and R₂ are linked through —(CH₂)ₚ—, wherein p is 2-9;
R₃ is C₁-C₁₈ alkyl;
R₄ and R₈ are each hydrogen;
R₅ is NH₂; and
R₇ is selected from the group consisting of hydrogen, C₁-C₁₈ alkyl, C₂-C₁₈ alkenyl, (C₀-C₄ alkyl)CONH₂, C₀-C₄ alkyl)COOH, (C₀-C₄ alkyl)NH₂, (C₀-C₄ alkyl)OH, and halo.

12. (canceled)

13. (canceled)

14. The prodrug of claim 9, wherein A-B comprise a structure of: [chemical structure]
wherein R₁ and R₂ are independently selected from the group consisting of hydrogen, C₁-C₁₈ alkyl and aryl, or R₁ and R₂ are linked through —(CH₂)ₚ—, wherein p is 2-9;
R₃ is C₁-C₁₈ alkyl or R₃ and R₄ together with the atoms to which they are attached form a 4-12 heterocyclic ring;
R₄ and R₈ are independently selected from the group consisting of hydrogen, C₁-C₈ alkyl and aryl; and
R₅ is an amine;
with the proviso that both R₁ and R₂ are not hydrogen and provided that one of R₄ or R₈ is hydrogen.

15. (canceled)

16. (canceled)

17. The prodrug of claim 9, wherein A-B comprise a structure of: [chemical structure]
wherein
(i) R₁ and R₂ are independently selected from the group consisting of hydrogen, C₁-C₁₈ alkyl, (C₁-C₁₈ alkyl)OH, (C₁-C₄ alkyl)NH₂, and (C₀-C₄ alkyl)(C₆-C₁₀ aryl)R₇, or R₁ and R₂ are linked through (CH₂)ₚ, wherein p is 2-9;
R₃ is C₁-C₁₈ alkyl or R₃ and R₄ together with the atoms to which they are attached form a 4-12 heterocyclic ring;
R₄ and R₈ are independently selected from the group consisting of hydrogen, C₁-C₈ alkyl and (C₀-C₄ alkyl)(C₆-C₁₀ aryl)R₇;
R₅ is NH₂; and
R₇ is selected from the group consisting of H, C₁-C₁₈ alkyl, C₂-C₁₈ alkenyl, (C₀-C₄ alkyl)CONH₂, (C₀-C₄ alkyl)COOH, (C₀-C₄ alkyl)NH₂, (C₀-C₄ alkyl)OH, and halo;
with the proviso that both R₁ and R₂ are not hydrogen and provided that at least one of R₄ or R₈ is hydrogen,
(ii) R₁ and R₂ are independently selected from the group consisting of hydrogen, C₁-C₈ alkyl and (C₁-C₄ alkyl)NH₂ or R₁ and R₂ are linked through (CH₂)ₚ, wherein p is 2-9;
R₃ is C₁-C₈ alkyl or R₃ and R₄ together with the atoms to which they are attached form a 4-6 heterocyclic ring;
R₄ is selected from the group consisting of hydrogen and C₁-C₈ alkyl; and
R₅ is NH₂;
R₈ is hydrogen;
with the proviso that both R₁ and R₂ are not hydrogen,
(iii) R₁ and R₂ are independently selected from the group consisting of hydrogen, C₁-C₈ alkyl and (C₁-C₄ alkyl)NH₂;
R₃ is C₁-C₆ alkyl;
R₄ is hydrogen; and
R₅ is NH₂;
R₈ is hydrogen;
with the proviso that both R₁ and R₂ are not hydrogen, or
(iv) R₁ and R₂ are independently selected from the group consisting of hydrogen, C₁-C₈ alkyl, (C₁-C₄ alkyl)NH₂ or R₁ and R₂ are linked through (CH₂)ₚ, wherein p is 2-9;
R₃ is C₁-C₈ alkyl;
R₄ is (C₀-C₄ alkyl)(C₆-C₁₀ aryl)R₇;
R₅ is NH₂; and
R₇ is selected from the group consisting of hydrogen, C₁-C₈ alkyl and (C₀-C₄ alkyl)OH;
R₈ is hydrogen;
with the proviso that both R₁ and R₂ are not hydrogen.

18-21. (canceled)

22. The prodrug of claim 9, wherein A-B comprise a structure of: [chemical structure]
wherein
(i) R₁ is selected from the group consisting of hydrogen, C₁-C₈ alkyl and aryl;
R₃ is C₁-C₁₈ alkyl;
R₄ and R₈ are each hydrogen; and
R₅ is an amine or N-substituted amine or a hydroxyl;
with the proviso that, if R₁ is alkyl or aryl, then R₁ and R₅ together with the atoms to which they are attached form a 4-11 heterocyclic ring, or
(ii) R₁ is selected from the group consisting of hydrogen, C₁-C₈ alkyl and (C₀-C₄ alkyl)(C₆-C₁₀ aryl)R₇;
R₃ is C₁-C₁₈ alkyl;
R₄ and R₈ are each hydrogen;
R₅ is NHR₆ or OH;
R₆ is H, C₁-C₈ alkyl, or R₆ and R₁ together with the atoms to which they are attached form a 4, 5 or 6 member heterocyclic ring; and
R₇ is selected from the group consisting of hydrogen, C₁-C₁₈ alkyl, C₂-C₁₈ alkenyl, (C₀-C₄ alkyl)CONH₂, (C₀-C₄ alkyl)COOH, (C₀-C₄ alkyl)NH₂, (C₀-C₄ alkyl)OH, and halo;
with the proviso that, if R₁ is alkyl or (C₀-C₄ alkyl)(C₆-C₁₀ aryl)R₇ then R₁ and R₅ together with the atoms to which they are attached form a 4-11 heterocyclic ring.

23. (canceled)

24. The prodrug of claim 1, wherein said primary amine is a side chain amino group of an internal amino acid of Q, said internal amino acid comprising the structure of Formula V: [chemical structure]
wherein
n is an integer selected from 1 to 4.

25. (canceled)

26. The prodrug of claim 24, wherein A-B comprises the structure: [chemical structure]
wherein
(i) R₁ and R₂ are independently C₁-C₈ alkyl or aryl; or R₁ and R₂ are linked through —(CH₂)ₚ—, wherein p is 2-9;
R₃ is C₁-C₁₈ alkyl;
R₄ and R₈ are each hydrogen; and
R₅ is an amine, or
(ii) R₁ and R₂ are independently C₁-C₈ alkyl or (C₀-C₄ alkyl)(C₆-C₁₀ aryl)R₇; or R₁ and R₂ are linked through —(CH₂)ₚ—, wherein p is 2-9;
R₃ is C₁-C₁₈ alkyl;
R₄ and R₈ are each hydrogen;
R₅ is NH₂; and
R₇ is selected from the group consisting of hydrogen, C₁-C₁₈ alkyl, C₂-C₁₈ alkenyl, (C₀-C₄ alkyl)CONH₂, C₀-C₄ alkyl)COOH, (C₀-C₄ alkyl)NH₂, (C₀-C₄ alkyl)OH, and halo.

27-28. (canceled)

29. The prodrug of claim 24, wherein A-B comprise a structure of: [chemical structure]
wherein
(i) R₁ and R₂ are independently selected from the group consisting of hydrogen, C₁-C₈ alkyl and aryl, or R₁ and R₂ are linked through —(CH₂)ₚ—, wherein p is 2-9;
R₃ is C₁-C₁₈ alkyl or R₃ and R₄ together with the atoms to which they are attached form a 4-12 heterocyclic ring;
R₄ and R₈ are independently C₁-C₁₈ alkyl or aryl; and
R₅ is an amine or N-substituted amine;
with the proviso that both R₁ and R₂ are not hydrogen and provided that one of R₄ or R₈ is hydrogen, or
(ii) R₁ and R₂ are independently selected from the group consisting of hydrogen, C₁-C₈ alkyl, and (C₀-C₄ alkyl)(C₆-C₁₀ aryl)R₇ or R₁ and R₂ are linked through —(CH₂)₂—, wherein p is 2-9;
R₃ is C₁-C₁₈ alkyl or R₃ and R₄ together with the atoms to which they are attached form a 4-12 heterocyclic ring;
R₄ and R₈ are independently hydrogen, C₁-C₁₈ alkyl or (C₀-C₄ alkyl)(C₆-C₁₀ aryl)R₇;
R₅ is NHR₆;
R₆ is H or C₁-C₈ alkyl, or R₆ and R₂ together with the atoms to which they are attached form a 4, 5 or 6 member heterocyclic ring; and
R₇ is selected from the group consisting of hydrogen, C₁-C₁₈ alkyl, C₂-C₁₈ alkenyl, (C₀-C₄ alkyl)CONH₂, (C₀-C₄ alkyl)COOH, (C₀-C₄ alkyl)NH₂, (C₀-C₄ alkyl)OH, halo;
with the proviso that both R₁ and R₂ are not hydrogen and provided that at least one of R₄ or R₈ is hydrogen.

30-31. (canceled)

32. The prodrug of claim 24, wherein A-B comprise a structure of: [chemical structure]
wherein
(i) R₁ and R₂ are independently selected from the group consisting of hydrogen, C₁-C₁₈ alkyl and aryl;
R₃ is C₁-C₁₈ alkyl;
R₄ and R₈ are each hydrogen; and
R₅ is an amine or N-substituted amine or a hydroxyl;
with the proviso that, if R₁ and R₂ are both independently an alkyl or aryl, either R₁ or R₂ is linked through —(CH₂)ₚ— to R₅, wherein p is 2-9, or
(ii) R₁ and R₂ are independently selected from the group consisting of hydrogen, C₁-C₁₈ alkyl and (C₀-C₄ alkyl)(C₆-C₁₀ aryl)R₇;
R₃ is C₁-C₁₈ alkyl;
R₄ and R₈ are each hydrogen;
R₅ is NHR₆ or OH;
R₆ is H or C₁-C₈ alkyl, or R₆ and R₁ together with the atoms to which they are attached form a 4, 5 or 6 member heterocyclic ring; and
R₇ is selected from the group consisting of hydrogen, C₁-C₁₈ alkyl, C₂-C₁₈ alkenyl, (C₀-C₄ alkyl)CONH₂, (C₀-C₄ alkyl)COOH, (C₀-C₄ alkyl)NH₂, and (C₀-C₄ alkyl) OH;
with the proviso that, if R₁ and R₂ are both independently an alkyl or (C₀-C₄ alkyl)(C₆-C₁₀ aryl)R₇ either R₁ or R₂ is linked through (CH₂)ₚ to R₅, wherein p is 2-9.

33. (canceled)

34. The prodrug of claim 24, wherein the amino acid of Formula V is located at a position of Q corresponding to position 12, 16, 17, 18, 20, 28, or 29 of native glucagon (SEQ ID NO: 701).

35. The prodrug of claim 1, wherein said primary amine is a substituent on an aryl of an aromatic amino acid of Q.

36. The prodrug of claim 35, wherein said aromatic amino acid is an internal amino acid of Q.

37. The prodrug of claim 35, wherein said aromatic amino acid is selected from the group consisting of amino-Phe, amino-napthyl alanine, amino tryptophan, amino-phenyl-glycine, amino-homo-Phe, and amino tyrosine.

38. The prodrug of claim 35, wherein said aromatic amino acid comprises the structure of Formula III: [chemical structure]
wherein m is an integer from 0 to 3.

39. (canceled)

40. The prodrug of claim 35, wherein A-B comprise a structure of: [chemical structure]
wherein
(i) R₁ and R₂ are independently C₁-C₁₈ alkyl or aryl;
R₃ is C₁-C₁₈ alkyl or R₃ and R₄ together with the atoms to which they are attached form a 4-12 heterocyclic ring;
R₄ and R₈ are independently selected from the group consisting of hydrogen, C₁-C₁₈ alkyl and aryl; and
R₅ is an amine or a hydroxyl, or
(ii) R₁ and R₂ are independently C₁-C₁₈ alkyl or (C₀-C₄ alkyl)(C₆-C₁₀ aryl)R₇;
R₃ is C₁-C₁₈ alkyl or R₃ and R₄ together with the atoms to which they are attached form a 4-12 heterocyclic ring;
R₄ and R₈ are independently selected from the group consisting of hydrogen, C₁-C₁₈ alkyl and (C₀-C₄ alkyl)(C₆-C₁₀ aryl)R₇;
R₅ is NH₂ or OH; and
R₇ is selected from the group consisting of hydrogen, C₁-C₁₈ alkyl, C₂-C₁₈ alkenyl, (C₀-C₄ alkyl)CONH₂, (C₀-C₄ alkyl)COOH, (C₀-C₄ alkyl)NH₂, (C₀-C₄ alkyl)OH, and halo.

41-42. (canceled)

43. The prodrug of claim 35, wherein A-B comprise a structure of: [chemical structure]
wherein
(i) R₁ is selected from the group consisting of hydrogen, C₁-C₁₈ alkyl and aryl, or R₁ and R₂ are linked through —(CH₂)ₚ—, wherein p is 2-9;
R₃ is C₁-C₁₈ alkyl or R₃ and R₄ together with the atoms to which they are attached form a 4-6 heterocyclic ring;
R₄ and R₈ are independently selected from the group consisting of hydrogen, C₁-C₁₈ alkyl and aryl; and
R₅ is an amine or N-substituted amine, or
R₁ is selected from the group consisting of hydrogen, C₁-C₁₈ alkyl, (C₁-C₁₈ alkyl)OH, (C₁-C₄ alkyl)NH₂, and C₀-C₄ alkyl)(C₆-C₁₀ aryl)R₇;
R₃ is C₁-C₁₈ alkyl or R₃ and R₄ together with the atoms to which they are attached form a 4-6 heterocyclic ring;
R₄ and R₈ are independently selected from the group consisting of hydrogen, C₁-C₁₈ alkyl and (C₀-C₄ alkyl)(C₆-C₁₀ aryl)R₇;
R₅ is NHR₆;
R₆ is H, C₁-C₈ alkyl, or R₆ and R₁ together with the atoms to which they are attached form a 4, 5 or 6 member heterocyclic ring; and
R₇ is selected from the group consisting of hydrogen, C₁-C₁₈ alkyl, C₂-C₁₈ alkenyl, (C₀-C₄ alkyl)CONH₂, (C₀-C₄ alkyl)COOH, (C₀-C₄ alkyl)NH₂, (C₀-C₄ alkyl)OH, and halo.

44-45. (canceled)

46. The prodrug of claim 35, wherein A-B comprise a structure of: [chemical structure]
wherein
(i) R₁ and R₂ are independently selected from the group consisting of hydrogen, C₁-C₈ alkyl and aryl;
R₃ is C₁-C₁₈ alkyl or R₃ and R₄ together with the atoms to which they are attached form a 4-6 heterocyclic ring;
R₄ and R₈ are each hydrogen; and
R₅ is selected from the group consisting of amine, N-substituted amine and hydroxyl, or
(ii) R₁ and R₂ are independently selected from the group consisting of hydrogen, C₁-C₈ alkyl, (C₁-C₄ alkyl)COOH, and (C₀-C₄ alkyl)(C₆-C₁₀ aryl)R₇, or R₁ and R₅ together with the atoms to which they are attached form a 4-11 heterocyclic ring;
R₃ is C₁-C₁₈ alkyl or R₃ and R₄ together with the atoms to which they are attached form a 4-6 heterocyclic ring;
R₄ is hydrogen or forms a 4-6 heterocyclic ring with R₃;
R₈ is hydrogen;
R₅ is NHR₆ or OH.
R₆ is H or C₁-C₈ alkyl, or R₆ and R₁ together with the atoms to which they are attached form a 4, 5 or 6 member heterocyclic ring; and
R₇ is selected from the group consisting of hydrogen, C₁-C₁₈ alkyl, C₂-C₁₈ alkenyl, (C₀-C₄ alkyl)CONH₂, (C₀-C₄ alkyl)COOH, (C₀-C₄ alkyl)NH₂, (C₀-C₄ alkyl)OH, and halo.

47. (canceled)

48. The prodrug of claim 35 wherein the amino substituted aromatic amino acid is located at a position of Q corresponding to position 10, 13, 22, or 25 of native glucagon (SEQ ID NO: 701).

49. The prodrug of claim 1, further comprising a hydrophilic moiety covalently linked to the prodrug.

50-52. (canceled)

53. The prodrug of claim 1, further comprising a non-native acyl group or a non-native alkyl group covalently linked to an amino acid side chain.

54-55. (canceled)

56. The prodrug of claim 1, wherein Q comprises an amino acid sequence at least 50% identical to native glucagon (SEQ ID NO: 701) that retains the alpha-helix conformation of the amino acids corresponding to amino acids 12-29 of SEQ ID NO: 701.

57-66. (canceled)

67. The prodrug of claim 1, wherein A is an amino acid in the D-stereochemical configuration.

68. A prodrug of claim 1, wherein Q is selected from the group consisting of SEQ ID NOs: 1-564, 566-570, 573-575, 577, 579-580, 585-612, 616, 618-632, 634-642, 647, 657-684, 701-732, 801-878, 883-919, 1001-1262, 1301-1371, 1401-1518, 1701-1708, 1710, 1711, 1731-1734, 1738, 1740, 1741, 1745, and 1747-1776.

69. A sterile pharmaceutical composition comprising the prodrug of claim 1, and a pharmaceutically acceptable carrier.

70. A method of treating hyperglycemia, treating diabetes, treating or preventing hypoglycemia, suppressing appetite, reducing weight gain, inducing weight loss, causing temporary paralysis of the intestinal tract in a patient in need thereof, said method comprising administering an effective amount of a pharmaceutical composition of claim 69.

71-75. (canceled)

The application's sequence listing, which the Patent Office published only in electronic form, follows.

SEQUENCE LISTING (1921 sequences)

SEQ ID NO: 1 - protein, 29 aa, Homo sapiens
HSQGTFTSDYSKYLDSRRAQDFVQWLMNT

SEQ ID NO: 2 - protein, 29 aa, Artificial Sequence
  Synthetic Glucagon Analogue
  MOD_RES (16)..(16): Glu, Gln, homoglutamic acid or homocysteic acid
  MOD_RES (17)..(17): Arg, Cys, Orn, homocysteine or acetyl phenylalanine
  MOD_RES (27)..(27): Met, Leu or Nle
HSQGTFTSDYSKYLDXXRAQDFVQWLXNT

SEQ ID NO: 3 - protein, 29 aa, Artificial Sequence
  Synthetic Glucagon Analogue
  MOD_RES (16)..(16): Glu, Gln, homoglutamic acid or homocysteic acid
  MOD_RES (21)..(21): Asp, Cys, Orn, homocysteine or acetyl phenyalanine
  MOD_RES (27)..(27): Met, Leu or Nle
HSQGTFTSDYSKYLDXRRAQXFVQWLXNT

SEQ ID NO: 4 - protein, 29 aa, Artificial Sequence
  Synthetic Glucagon Analogue
  MOD_RES (16)..(16): Glu, Gln, homoglutamic acid or homocysteic acid
  MOD_RES (24)..(24): Gln, Cys, Orn, homocysteine or acetyl phenylalanine
  MOD_RES (27)..(27): Met, Leu or Nle
HSQGTFTSDYSKYLDXRRAQDFVXWLXNT

SEQ ID NO: 5 - protein, 29 aa, Artificial Sequence
  Synthetic Glucagon Analogue
  MOD_RES (16)..(16): Glu, Gln, homoglutamic acid or homocysteic acid
  MOD_RES (21)..(21): Asp, Cys, Orn, homocysteine or acetyl phenyalanine
  MOD_RES (24)..(24): Gln, Cys, Orn, homocysteine or acetyl phenyalanine
  MOD_RES (27)..(27): Met, Leu or Nle
HSQGTFTSDYSKYLDXRRAQXFVXWLXNT

SEQ ID NO: 6 - protein, 29 aa, Artificial Sequence
  Synthetic Glucagon Analogue
  MOD_RES (21)..(21): Asp, Cys, Orn, homocysteine or acetyl phenyalanine
  MOD_RES (27)..(27): Met, Leu or Nle
HSQGTFTSDYSKYLDERRAQXFVQWLXNT

SEQ ID NO: 7 - protein, 29 aa, Artificial Sequence
  Synthetic Glucagon Analogue
  MOD_RES (24)..(24): Gln, Cys, Orn, homocysteine or acetyl phenylalanine
  MOD_RES (27)..(27): Met, Leu or Nle
HSQGTFTSDYSKYLDERRAQDFVXWLXNT

SEQ ID NO: 8 - protein, 29 aa, Artificial Sequence
  Synthetic Glucagon Analogue
  MOD_RES (16)..(16): Glu, Gln, homoglutamic acid or homocysteic acid
HSQGTFTSDYSKYLDXRRAQDFVQWLMNT

SEQ ID NO: 9 - protein, 29 aa, Artificial Sequence
  Synthetic Glucagon Analogue
  MOD_RES (27)..(27): Met, Leu or Nle
HSQGTFTSDYSKYLDERRAQDFVQWLXNT

SEQ ID NO: 10 - protein, 29 aa, Artificial Sequence
  Synthetic Glucagon Analogue
HSQGTFTSDYSKYLDERRAQDFVQWLMNT

SEQ ID NO: 11 - protein, 29 aa, Artificial Sequence
  Synthetic Glucagon Analogue
  MISC_FEATURE: c-term amidation
HSQGTFTSDYSKYLDERRAQDFVQWLMNT

SEQ ID NO: 12 - protein, 29 aa, Artificial Sequence
  Synthetic Glucagon Analogue
  MISC_FEATURE (12)..(16): Lactam ring between side chains at position 12 and 16
HSQGTFTSDYSKYLDERRAQDFVQWLMNT

SEQ ID NO: 13 - protein, 29 aa, Artificial Sequence
  Synthetic Glucagon Analogue
  MISC_FEATURE (16)..(20): Lactam ring between side chains at positions 16 and 20
HSQGTFTSDYSKYLDERRAKDFVQWLMNT

SEQ ID NO: 14 - protein, 29 aa, Artificial Sequence
  Synthetic Glucagon Analogue
  MISC_FEATURE (22)..(24): Lactam ring between side chains at positions 22 and 24
HSQGTFTSDYSKYLDSRRAKDFVEWLMNT

SEQ ID NO: 15 - protein, 29 aa, Artificial Sequence
  Synthetic Glucagon Analogue
  MISC_FEATURE (24)..(28): Lactam ring formed between side chains at positions 24 and 28
HSQGTFTSDYSKYLDSRRAQDFVEWLMKT

SEQ ID NO: 16 - protein, 29 aa, Artificial Sequence
  Synthetic Glucagon Analogue
  MISC_FEATURE (12)..(16): Lactam ring between side chains at positions 12 and 16
  MISC_FEATURE (20)..(24): Lactam ring between side chains at positions 20 and 24
HSQGTFTSDYSKYLDERRAKDFVEWLMNT

SEQ ID NO: 17 - protein, 29 aa, Artificial Sequence
  Synthetic Glucagon Analogue
  MISC_FEATURE (16)..(20): Lactam ring between side chains at positions 16 and 20
  MISC_FEATURE (24)..(28): Lactam ring between side chains at positions 24 and 28
HSQGTFTSDYSKYLDERRADDFVEWLMKT

SEQ ID NO: 18 - protein, 29 aa, Artificial Sequence
  Synthetic Glucagon Analogue
  MISC_FEATURE (16)..(20): Lactam ring between side chains at positions 16 and 20
HSQGTFTSDYSKYLDERRAKDFVEWLMKT

SEQ ID NO: 19 - protein, 30 aa, Artificial Sequence
  Synthetic Glucagon Analogue
  MISC_FEATURE: c-term amidation
  MOD_RES (30)..(30): Variable amino acid
HSQGTFTSDYSKYLDERRAQDFVQWLMNTX

SEQ ID NO: 20 - protein, 29 aa, Artificial Sequence
  Synthetic Glucagon Analogue
  MOD_RES (16)..(16): Ser, Glu, Gln, homoglutamic acid or homocysteic acid
  MOD_RES (20)..(20): Gln, Lys, Arg, Orn or Citrulline
  MOD_RES (24)..(24): Gln or Glu
  MOD_RES (28)..(28): Asn, Asp or Lys
  MOD_RES (29)..(29): Thr or Gly
HSQGTFTSDYSKYLDXRRAXDFVXWLMXX

SEQ ID NO: 21 - protein, 29 aa, Artificial Sequence
  Synthetic Glucagon Analogue
  MISC_FEATURE: c-term amidation
  MOD_RES (2)..(2): D-Ser, Ala, Gly, N-methyl Ser or aminoisobutyric acid
HXQGTFTSDYSKYLDERRAQDFVQWLMNT

SEQ ID NO: 22 - protein, 29 aa, Artificial Sequence
  Synthetic Glucagon Analogue
  MISC_FEATURE: c-term amidation
  MOD_RES (2)..(2): Aminoisobutyric acid
HXQGTFTSDYSKYLDERRAQDFVQWLMNT

SEQ ID NO: 23 - protein, 29 aa, Artificial Sequence
  Synthetic Glucagon Analogue
  MISC_FEATURE: c-term amidation
  MOD_RES (17)..(17): Cys-PEG
  MOD_RES (27)..(27): Met, Leu or Nle
HSQGTFTSDYSKYLDECRAQDFVQWLXNT

SEQ ID NO: 24 - protein, 29 aa, Artificial Sequence
  Synthetic Glucagon Analogue
  MISC_FEATURE: c-term amidation
  MOD_RES (21)..(21): Cys-PEG
  MOD_RES (27)..(27): Met, Leu or Nle
HSQGTFTSDYSKYLDERRAQCFVQWLXNT

SEQ ID NO: 25 - protein, 29 aa, Artificial Sequence
  Synthetic Glucagon Analogue
  MISC_FEATURE: c-term amidation
  MOD_RES (24)..(24): Cys-PEG
  MOD_RES (27)..(27): Met, Leu or Nle
HSQGTFTSDYSKYLDERRAQDFVCWLXNT

SEQ ID NO: 26 - protein, 10 aa, Artificial Sequence
  Synthetic peptide fragment representing the carboxy terminal 10 amino acids Exendin-4
GPSSGAPPPS

SEQ ID NO: 27 - protein, 8 aa, Artificial Sequence
  Synthetic peptide fragment representing the carboxy terminal 8 amino acids of oxyntomodulin
KRNRNNIA

SEQ ID NO: 28 - protein, 4 aa, Artificial Sequence
  Synthetic peptide
KRNR

SEQ ID NO: 29 - protein, 10 aa, Artificial Sequence
  Synthetic peptide fragment representing the carboxy terminal 10 amino acids of Exendin-4
  MISC_FEATURE: c-term amidation
GPSSGAPPPS

SEQ ID NO: 30 - protein, 39 aa, Artificial Sequence
  Synthetic Glucagon Analogue
  MOD_RES (27)..(27): Met, Leu or Nle
HSQGTFTSDYSKYLDERRAQDFVQWLXNTGPSSGAPPPS

SEQ ID NO: 31 - protein, 37 aa, Artificial Sequence
  Synthetic Glucagon Analogue
  MOD_RES (27)..(27): Met, Leu or Nle
HSQGTFTSDYSKYLDERRAQDFVQWLXNTKRNRNNIA

SEQ ID NO: 32 - protein, 33 aa, Artificial Sequence
  Synthetic Glucagon Analogue
  MOD_RES (27)..(27): Met, Leu or Nle
HSQGTFTSDYSKYLDERRAQDFVQWLXNTKRNR

SEQ ID NO: 33 - protein, 29 aa, Artificial Sequence
  Synthetic Glucagon Analogue
  MOD_RES (15)..(15): Asp, Glu, homoglutamic acid, cysteic acid or homocysteic acid
  MOD_RES (16)..(16): Ser, Glu, Gln, homoglutamic acid or homocysteic acid
  MOD_RES (20)..(20): Gln or Lys
  MOD_RES (24)..(24): Gln or Glu
  MOD_RES (28)..(28): Asn, Lys or an acidic amino acid
  MOD_RES (29)..(29): Thr, Gly or an acidic amino acid
HSQGTFTSDYSKYLXXRRAXDFVXWLMXX

SEQ ID NO: 34 - protein, 29 aa, Artificial Sequence
  Synthetic Glucagon Analogue
  MOD_RES (15)..(15): Asp, Glu, cysteic acid, homoglutamic acid or homocysteic acid
  MOD_RES (16)..(16): Ser, Glu, Gln, homoglutamic acid or homocysteic acid
  MOD_RES (20)..(20): Gln or Lys
  MOD_RES (24)..(24): Gln or Glu
  MOD_RES (28)..(28): Asn, Asp or Lys
  MOD_RES (29)..(29): Thr or Gly
HSQGTFTSDYSKYLDXRRAXDFVXWLMXX

SEQ ID NO: 35 - protein, 29 aa, Artificial Sequence
  Synthetic Glucagon Analogue
HSQGTFTSDYSKYLDSCRAQDFVQWLMNT

SEQ ID NO: 36 - protein, 39 aa, Artificial Sequence
  Synthetic Glucagon Analogue
HSQGTFTSDYSKYLDSRRAQDFVQWLMNTGPSSGAPPPS

SEQ ID NO: 37 - protein, 29 aa, Artificial Sequence
  Synthetic Glucagon Analogue
  MOD_RES (24)..(24): 2-butyrolactone bound through thiol group of Cys
HSQGTFTSDYSKYLDSRRAQDFVCWLMNT

SEQ ID NO: 38 - protein, 29 aa, Artificial Sequence
  Synthetic Glucagon Analogue
  MOD_RES (24)..(24): Carboxymethyl group bound through thiol group of Cys
HSQGTFTSDYSKYLDSRRAQDFVCWLMNT

SEQ ID NO: 39 - protein, 39 aa, Artificial Sequence
  Synthetic Glucagon Analogue
HSQGTFTSDYSRYLDSRRAQDFVQWLMNTGPSSGAPPPS

SEQ ID NO: 40 - protein, 29 aa, Artificial Sequence
  Synthetic Glucagon Analogue
  MISC_FEATURE: c-term amidation
  MOD_RES (15)..(15): Glu or Asp
  MOD_RES (28)..(28): Glu or Asp
HSQGTFTSDYSKYLXERRAQDFVQWLMXT

SEQ ID NO: 41 - protein, 29 aa, Artificial Sequence
  Synthetic Glucagon Analogue
  MISC_FEATURE: c-term amidation; lactam ring between side chains at positions 12 and 16
  MISC_FEATURE: c-term amidation
  MISC_FEATURE (12)..(16): Lactam ring between side chains at positions 12 and 16
  MOD_RES (15)..(15): Glu or Asp
  MOD_RES (28)..(28): Glu or Asp
HSQGTFTSDYSKYLXERRAQDFVQWLMXT

SEQ ID NO: 42 - protein, 29 aa, Artificial Sequence
  Synthetic Glucagon Analogue
  MISC_FEATURE: c-term amidation; lactam ring between side chains at positions 16 and 20
  MISC_FEATURE: c-term amidation
  MOD_RES (15)..(15): Glu or Asp
  MISC_FEATURE (16)..(20): Lactam ring between side chains at positions 16 and 20
  MOD_RES (28)..(28): Glu or Asp
HSQGTFTSDYSKYLXERRAKDFVQWLMXT

SEQ ID NO: 43 - protein, 29 aa, Artificial Sequence
  Synthetic Glucagon Analogue
  MISC_FEATURE: c-term amidation
  MOD_RES (15)..(15): Glu or Asp
  MISC_FEATURE (20)..(24): Lactam ring between side chains at positions 20 and 24
  MOD_RES (28)..(28): Glu or Asp
HSQGTFTSDYSKYLXSRRAKDFVEWLMXT

SEQ ID NO: 44 - protein, 29 aa, Artificial Sequence
  Synthetic Glucagon Analogue
  MISC_FEATURE: c-term amidation
  MOD_RES (15)..(15): Glu or Asp
  MISC_FEATURE (24)..(28): Lactam ring between side chains at positions 24 and 28
  MOD_RES (29)..(29): Glu or Thr
HSQGTFTSDYSKYLXSRRAQDFVEWLMKX

SEQ ID NO: 45 - protein, 29 aa, Artificial Sequence
  Synthetic Glucagon Analogue
  MOD_RES (12)..(12): Lys or Glu
  MOD_RES (15)..(15): Asp, Glu, homoglutamic acid, cysteic acid or homocysteic acid
  MOD_RES (16)..(16): Ser, Gln, Glu, Lys, homoglutamic acid, cysteic acid or homocysteic acid
  MOD_RES (20)..(20): Gln, Glu or Lys
  MOD_RES (24)..(24): Gln, Lys or Glu
  MOD_RES (28)..(28): Asn, Lys or an acidic amino acid
  MOD_RES (29)..(29): Thr, Gly or an acidic amino acid
HSQGTFTSDYSXYLXXRRAXDFVXWLMXX

SEQ ID NO: 46 - protein, 29 aa, Artificial Sequence
  Synthetic Glucagon Analogue
  MOD_RES (16)..(16): Ser, Glu, Gln, homoglutamic acid or homocysteic acid
  MOD_RES (20)..(20): Gln or Lys
  MOD_RES (24)..(24): Gln or Glu
HSQGTFTSDYSKYLDXRRAXDFVXWLMNT

SEQ ID NO: 47 - protein, 29 aa, Artificial Sequence
  Synthetic Glucagon Analogue
HSQGTFTSDYSKYLDERRAKDFVQWLMNT

SEQ ID NO: 48 - protein, 29 aa, Artificial Sequence
  Synthetic Glucagon Analogue
HSQGTFTSDYSKYLDSRRAKDFVEWLMNT

SEQ ID NO: 49 - protein, 29 aa, Artificial Sequence
  Synthetic Glucagon Analogue
HSQGTFTSDYSKYLDSRRAQDFVEWLMKT

SEQ ID NO: 50 - protein, 31 aa, Homo sapiens
HAEGTFTSDVSSYLEGQAAKEFIAWLVKGRG

SEQ ID NO: 51 - protein, 29 aa, Artificial Sequence
  Synthetic Glucagon Analogue
  MOD_RES (15)..(15): Asp, Glu, homoglutamic acid, cysteic acid or homocysteic acid
  MOD_RES (16)..(16): Ser, Glu, Gln, homoglutamic acid or homocysteic acid
  MOD_RES (20)..(20): Gln, Lys, Arg, Orn, or Citrulline
  MOD_RES (21)..(21): Asp, Glu, homoglutamic acid, or homocysteic acid
  MOD_RES (24)..(24): Gln or Glu
  MOD_RES (28)..(28): Asn, Lys or an acidic amino acid
  MOD_RES (29)..(29): Thr, Gly or an acidic amino acid
HSQGTFTSDYSKYLXXRRAXXFVXWLMXX

SEQ ID NO: 52 - protein, 30 aa, Artificial Sequence
  Synthetic peptide
  MISC_FEATURE: c-term amidation
HAEGTFTSDVSSYLEGQAAKEFIAWLVKGR

SEQ ID NO: 53 - protein, 29 aa, Artificial Sequence
  Synthetic Glucagon Analogue
  MOD_RES (3)..(3): Glu, Orn or Nle
  MOD_RES (15)..(15): Asp, Glu, homoglutamic acid, cysteic acid or homocysteic acid
  MOD_RES (16)..(16): Ser, Glu, Gln, homoglutamic acid or homocysteic acid
  MOD_RES (20)..(20): Gln or Lys
  MOD_RES (24)..(24): Gln or Glu
  MOD_RES (28)..(28): Asn, Lys or an acidic amino acid
  MOD_RES (29)..(29): Thr or an acidic amino acid
HSXGTFTSDYSKYLXXRRAXDFVXWLMXX

SEQ ID NO: 54 - protein, 29 aa, Artificial Sequence
  Synthetic Glucagon Analogue
  MOD_RES (17)..(17): Arg or Gln
  MOD_RES (18)..(18): Arg or Ala
  MOD_RES (21)..(21): Asp or Glu
  MOD_RES (23)..(23): Val or Ile
  MOD_RES (24)..(24): Gln or Ala
HSQGTFTSDYSKYLDEXXAKXFXXWLMNT

SEQ ID NO: 55 - protein, 29 aa, Artificial Sequence
  Synthetic Glucagon Analogue
  MOD_RES (1)..(1): His, D-His, (Des-amino)His, hydroxyl-His, acetyl-His, homo-His or alpha, alpha-dimethyl imidiazole acetic acid (DMIA), N-methyl His, alpha-methyl His, or imidazole acetic acid
  MOD_RES (2)..(2): Ser, D-Ser, Ala, D-Ala, Val, Gly, N-methyl Ser, aminoisobutyric acid (AIB) or N-methyl Ala
  MOD_RES (3)..(3): Gln, Glu, Orn or  Nle
  MOD_RES (10)..(10): Tyr or Trp
  MOD_RES (12)..(12): Lys, Citrulline, Orn or Arg
  MOD_RES (15)..(15): Asp, Glu, cysteic acid, homoglutamic acid and homocysteic acid
  MOD_RES (16)..(16): Ser, Glu, Gln, homoglutamic acid or homocysteic acid
  MOD_RES (17)..(17): Arg, Gln, Lys, Cys, Orn, homocysteine or acetyl phenylalanine
  MOD_RES (18)..(18): Arg, Ala, Lys, Cys, Orn, homocysteine or acetyl phenyalanine
  MOD_RES (20)..(20): Gln, Lys, Arg, Orn or Citrulline
  MOD_RES (21)..(21): Gln, Glu, Asp, Lys, Cys, Orn, homocystein or acetyl phenyalanine
  MOD_RES (23)..(23): Val or Ile
  MOD_RES (24)..(24): Ala, Gln, Glu, Lys, Cys, Orn, homocysteine or acetyl phenyalanine
  MOD_RES (27)..(27): Met, Leu or Nle
  MOD_RES (28)..(28): Asn, Arg, Citrulline, Orn, Lys or Asp
  MOD_RES (29)..(29): Thr, Gly, Lys, Cys, Orn, homocycsteine or acetyl phenyalanine
XXXGTFTSDXSXYLXXXXAXXFXXWLXXX

SEQ ID NO: 56 - protein, 29 aa, Artificial Sequence
  Synthetic Glucagon Analogue
  MOD_RES (1)..(1): His, D-His, (Des-amino)His, hydroxyl-His, acetyl-His, homo-His, DMIA, N-methyl His, alpha-methyl His, or imidazole acetic acid
  MOD_RES (2)..(2): Ser, D-Ser, Ala, D-Ala, Val, Gly, N-methyl Ser, AIB or N-methyl Ala
  MOD_RES (3)..(3): Gln, Glu, Orn or  Nle
  MOD_RES (15)..(15): Asp, Glu, cysteic acid, homoglutamic acid and homocysteic acid
  MOD_RES (16)..(16): Ser, Glu, Gln, homoglutamic acid or homocysteic acid
  MOD_RES (20)..(20): Gln, Lys, Arg, Orn or Citrulline
  MOD_RES (21)..(21): Gln, Glu, Asp, Cys, Orn, homocycstein or acetyl phenyalanine
  MOD_RES (23)..(23): Val or Ile
  MOD_RES (24)..(24): Ala, Gln, Glu, Cys, Orn, homocycsteine or acetyl phenyalanine
  MOD_RES (27)..(27): Met, Leu or Nle
  MOD_RES (28)..(28): Asn, Lys or Asp
  MOD_RES (29)..(29): Thr, Gly, Lys, Cys, Orn, homocycsteine or acetyl phenyalanine
XXXGTFTSDYSKYLXXRRAXXFXXWLXXX

SEQ ID NO: 57 - protein, 29 aa, Artificial Sequence
  Synthetic Glucagon Analogue
  MOD_RES (1)..(1): His, D-His, (Des-amino)His, hydroxyl-His, acetyl- His, homo-His, DMIA, N-methyl His, alpha-methyl His, or imidazole acetic acid
  MOD_RES (2)..(2): Ser, D-Ser, Ala, D-Ala, Val, Gly, N-methyl Ser, AIB or N-methyl Ala
  MOD_RES (3)..(3): Gln, Glu, Orn or  Nle
  MISC_FEATURE (12)..(16): Lactam ring between side changes at position 12 and 16
  MOD_RES (15)..(15): Asp, Glu, cysteic acid, homoglutamic acid and homocysteic acid
  MOD_RES (20)..(20): Gln, Lys, Arg, Orn or Citrulline
  MOD_RES (21)..(21): Gln, Glu, Asp, Cys, Orn, homocycsteine or acetyl phenyalanine
  MOD_RES (23)..(23): Val or Ile
  MOD_RES (24)..(24): Ala, Gln, Glu, Lys, Cys, Orn, homocysteine or acetyl Phe
  MOD_RES (27)..(27): Met, Leu or Nle
  MOD_RES (28)..(28): Asn, Lys or Asp
  MOD_RES (29)..(29): Thr, Gly, Lys, Cys, Orn, homocysteine or acetyl phenyalanine
XXXGTFTSDYSKYLXERRAXXFXXWLXXX

SEQ ID NO: 58 - protein, 29 aa, Artificial Sequence
  Synthetic Glucagon Analogue
  MOD_RES (1)..(1): His, D-His, (Des-amino)His, hydroxyl-His, acetyl-His, homo-His, DMIA, N-methyl His, alpha-methyl His, or imidazole acetic acid
  MOD_RES (2)..(2): Ser, D-Ser, Ala, D-Ala, Val, Gly, N-methyl Ser, AIB or N-methyl Ala
  MOD_RES (3)..(3): Gln, Glu, Orn or Nle
  MOD_RES (15)..(15): Asp, Glu, cysteic acid, homoglutamic acid or homocysteic acid
  MISC_FEATURE (16)..(20): Lactam ring between side chains at positions 16 and 20
  MOD_RES (21)..(21): Gln, Glu, Asp, Lys, Cys, Orn, homocysteine or acetyl phenyalanine
  MOD_RES (23)..(23): Val or Ile
  MOD_RES (24)..(24): Ala, Gln, Glu, Lys, Cys, Orn, homocysteine or acetyl phenyalanine
  MOD_RES (27)..(27): Met, Leu or Nle
  MOD_RES (28)..(28): Asn, Lys or Asp
  MOD_RES (29)..(29): Thr, Gly, Lys, Cys, Orn, homocysteine or acetyl phenyalanine
XXXGTFTSDYSKYLXERRAKXFXXWLXXX

SEQ ID NO: 59 - protein, 29 aa, Artificial Sequence
  Synthetic Glucagon Analogue
  MOD_RES (1)..(1): His, D-His, (Des-amino)His, hydroxyl-His, acetyl-His, homo-His, DMIA, N-methyl His, alpha-methyl His, or imidazole acetic acid
  MOD_RES (2)..(2): Ser, D-Ser, Ala, D-Ala, Val, Gly, N-methyl Ser, AIB, or N-methyl Ala
  MOD_RES (3)..(3): Gln, Glu, Orn or  Nle
  MOD_RES (15)..(15): Asp, Glu, cysteic acid, homoglutamic acid and homocysteic acid
  MOD_RES (16)..(16): Ser, Glu, Gln, homoglutamic acid or homocysteic acid
  MISC_FEATURE (20)..(24): Lactam ring between side chains at position 20 and 24
  MOD_RES (21)..(21): Gln, Glu, Asp, Lys, Cys, Orn, homocysteine or acetyl phenyalanine
  MOD_RES (23)..(23): Val or Ile
  MOD_RES (27)..(27): Met, Leu or Nle
  MOD_RES (28)..(28): Asn, Lys or Asp
  MOD_RES (29)..(29): Thr, Gly, Lys, Cys, Orn, homocysteine or acetyl pheylalanine
XXXGTFTSDYSKYLXXRRAKXFXEWLXXX

SEQ ID NO: 60 - protein, 29 aa, Artificial Sequence
  Synthetic Glucagon Analogue
  MOD_RES (1)..(1): His, D-His, (Des-amino)His, hydroxyl-His, acetyl-His, homo-His, DMIA, N-methyl His, alpha-methyl His, or imidazole acetic acid
  MOD_RES (2)..(2): Ser, D-Ser, Ala, D-Ala, Val, Gly, N-methyl Ser, AIB or N-methyl Ala
  MOD_RES (3)..(3): Gln, Glu, Orn or  Nle
  MOD_RES (15)..(15): Asp, Glu, cysteic acid, homoglutamic acid and homocysteic acid
  MOD_RES (16)..(16): Ser, Glu, Gln, homoglutamic acid or homocysteic acid
  MOD_RES (20)..(20): Gln, Lys, Arg, Orn, or Citrulline
  MOD_RES (21)..(21): Gln, Glu, Asp, Lys, Cys, Orn, homocysteine or acetyl phenyalanine
  MOD_RES (23)..(23): Val or Ile
  MISC_FEATURE (24)..(28): Lactam ring between side chains at position 24 and 28
  MOD_RES (27)..(27): Met, Leu or Nle
  MOD_RES (29)..(29): Thr, Gly, Lys, Cys, Orn, homocysteine or acetyl phenyalanine
XXXGTFTSDYSKYLXXRRAXXFXEWLXKX

SEQ ID NO: 61 - protein, 40 aa, Artificial Sequence
  Synthetic Glucagon Analogue
  MISC_FEATURE: positions 30 to 40 are present only if position 29 is Gly; see specification as filed for detailed description of substitutions and preferred embodiments
  MOD_RES (1)..(1): His, D-His, (Des-amino)His, hydroxyl-His, acetyl-His, homo-His, DMIA, N-methyl His, alpha-methyl His, or imidazole acetic acid
  MOD_RES (2)..(2): Ser, D-Ser, Ala, Val, Gly, N-methyl Ser, Aib, N-methyl, Ala or D-Ala
  MOD_RES (18)..(18): Ala or Arg
  MOD_RES (24)..(24): Ala, Gln or Cys-PEG
  MOD_RES (29)..(29): Thr-CONH2, Cys-PEG, or Gly
  MOD_RES (40)..(40): Cys-PEG or not present
XXQGTFTSDYSKYLDERXAKDFVXWLMNXGPSSGAPPPSC

SEQ ID NO: 62 - protein, 40 aa, Artificial Sequence
  Synthetic Glucagon Analogue
  MISC_FEATURE: positions 30 to 40 are present only if position 29 is Gly; see specification as filed for detailed description of substitutions and preferred embodiments
  MOD_RES (1)..(1): His, D-His, (Des-amino)His, hydroxyl-His, acetyl-His, homo-His, DMIA, N-methyl His, alpha-methyl His, or imidazole acetic acid
  MOD_RES (2)..(2): Ser, D-Ser, Ala, Val, Gly, N-methyl Ser, AIB0, N-methyl Ala, or D-Ala
  MOD_RES (18)..(18): Ala or Arg
  MOD_RES (24)..(24): Ala, Gln or Cys-PEG
  MOD_RES (29)..(29): Thr-CONH2, Cys-PEG, or Gly
  MOD_RES (40)..(40): Cys-PEG or not present
XXQGTFTSDYSKYLDEQXAKEFIXWLMNXGPSSGAPPPSC

SEQ ID NO: 63 - protein, 29 aa, Artificial Sequence
  Synthetic Glucagon Analogue
  MOD_RES (16)..(16): Ser, Glu, Gln, homoglutamic acid or homocysteic acid
  MOD_RES (20)..(20): Gln or Lys
  MOD_RES (21)..(21): Asp, Lys, Cys, Orn, homocysteine or acetyl phealanine
  MOD_RES (24)..(24): Gln, Lys, Cys, Orn, homocysteine or acetyl phealanine
  MOD_RES (27)..(27): Met, Leu or Nle
HSQGTFTSDYSKYLDXRRAXXFVXWLXNT

SEQ ID NO: 64 - protein, 38 aa, Artificial Sequence
  Synthetic Glucagon Analogue
  MOD_RES (15)..(15): Asp, Glu, homoglutamic acid, cysteic acid or homocysteic acid
  MOD_RES (16)..(16): Ser, Glu, Gln, homoglutamic acid or homocysteic acid
  MOD_RES (20)..(20): Gln or Lys
  MOD_RES (24)..(24): Gln or Glu
  MOD_RES (28)..(28): Asn, Lys or Asp
HSQGTFTSDYSKYLXXRRAXDFVXWLMXGGPSSGPPPS

SEQ ID NO: 65 - protein, 11 aa, Artificial Sequence
  Synthetic peptide fragment representing the carboxy terminal 10 amino acids of Exdendin-4
  MOD_RES (11)..(11): Cys-PEG
GPSSGAPPPSC

SEQ ID NO: 66 - protein, 29 aa, Artificial Sequence
  Synthetic Glucagon Analogue
  MISC_FEATURE (12)..(16): Lactam ring between side chains at positions 12 and 16
  MOD_RES (28)..(28): Asp or Asn
  MOD_RES (29)..(29): Thr or Gly
HSQGTFTSDYSKYLDERRAQDFVQWLMXX

SEQ ID NO: 67 - protein, 29 aa, Artificial Sequence
  Synthetic Glucagon Analogue
  MISC_FEATURE (16)..(20): Lactam ring between side chains at positions 16 and 20
  MOD_RES (28)..(28): Asp or Asn
  MOD_RES (29)..(29): Thr or Gly
HSQGTFTSDYSKYLDERRAKDFVQWLMXX

SEQ ID NO: 68 - protein, 29 aa, Artificial Sequence
  Synthetic Glucagon Analogue
  MISC_FEATURE (20)..(24): Lactam ring between side chains at positions 20 and 24
  MOD_RES (28)..(28): Asp or Asn
  MOD_RES (29)..(29): Thr or Gly
HSQGTFTSDYSKYLDSRRAKDFVEWLMXX

SEQ ID NO: 69 - protein, 29 aa, Artificial Sequence
  glucagon analogue
  MISC_FEATURE (24)..(28): Lactam ring between side chains at positions 24 and 28
  MOD_RES (29)..(29): Thr or Gly
HSQGTFTSDYSKYLDSRRAQDFVEWLMKX

SEQ ID NO: 70 - protein, 29 aa, Artificial Sequence
  Synthetic peptide
  MISC_FEATURE: c-term amidation
HSQGTFTSDYSKYLDERRAQDFVQWLMNT

SEQ ID NO: 71 - protein, 29 aa, Artificial Sequence
  Synthetic peptide
  MISC_FEATURE: c-term amidation
HSQGTFTSDYSKYLDERRAKDFVQWLMNT

SEQ ID NO: 72 - protein, 29 aa, Artificial Sequence
  Synthetic peptide
  MISC_FEATURE: c-term amidation
  MISC_FEATURE (16)..(20): Lactam ring between side chains at positions 16 and 20
HSQGTFTSDYSKYLDERRAKDFVQWLMNT

SEQ ID NO: 73 - protein, 29 aa, Artificial Sequence
  Synthetic peptide
  MISC_FEATURE: c-term amidation
  MISC_FEATURE (12)..(16): Lactam ring between side chains at positions 12 and 16
HSQGTFTSDYSKYLDERRAQDFVQWLMNT

SEQ ID NO: 74 - protein, 29 aa, Artificial Sequence
  Synthetic peptide
  MISC_FEATURE: c-term amidation
  MISC_FEATURE (12)..(16): Lactam ring between side chains at positions 12 and 16
HSQGTFTSDYSKYLDERRAKDFVQWLMNT

SEQ ID NO: 75 - protein, 29 aa, Artificial Sequence
  Synthetic peptide
  MISC_FEATURE: c-term amidation
  MISC_FEATURE (16)..(20): Lactam ring between side chains at positions 16 and 20
HSQGTFTSDYSKYLDKRRAEDFVQWLMNT

SEQ ID NO: 76 - protein, 29 aa, Artificial Sequence
  Synthetic peptide
  MISC_FEATURE: c-term amidation
HSQGTFTSDYSKYLDERAAKDFVQWLMNT

SEQ ID NO: 77 - protein, 29 aa, Artificial Sequence
  Synthetic Polypeptide
  MISC_FEATURE: c-term amidation
  MISC_FEATURE (16)..(20): Lactam ring between side chains at positions 16 and 20
HSQGTFTSDYSKYLDERAAKDFVQWLMNT

SEQ ID NO: 78 - protein, 29 aa, Artificial Sequence
  Synthetic Polypeptide
  MISC_FEATURE: c-term amidation
  MISC_FEATURE (12)..(16): Lactam ring between side chains at positions 12 and 16
HSQGTFTSDYSKYLDERAAQDFVQWLMNT

SEQ ID NO: 79 - protein, 29 aa, Artificial Sequence
  Synthetic Polypeptide
  MISC_FEATURE: c-term amidation
  MISC_FEATURE (12)..(16): Lactam ring between side chains at positions 12 and 16
HSQGTFTSDYSKYLDERAAKDFVQWLMNT

SEQ ID NO: 80 - protein, 29 aa, Artificial Sequence
  Synthetic Polypeptide
  MISC_FEATURE: c-term amidation
  MISC_FEATURE (16)..(20): Lactam ring between side chains at positions 16 and 20
HSQGTFTSDYSKYLDKRAAEDFVQWLMNT

SEQ ID NO: 81 - protein, 29 aa, Artificial Sequence
  Synthetic Polypeptide
  MISC_FEATURE: c-term amidation
HSQGTFTSDYSKYLDEQAAKEFIAWLMNT

SEQ ID NO: 82 - protein, 29 aa, Artificial Sequence
  Synthetic Polypeptide
  MISC_FEATURE: c-term amidation
  MISC_FEATURE (12)..(16): Lactam ring between side chains at positions 12 and 16
HSQGTFTSDYSKYLDEQAAKEFIAWLMNT

SEQ ID NO: 83 - protein, 29 aa, Artificial Sequence
  Synthetic Polypeptide
  MISC_FEATURE: c-term amidation
  MISC_FEATURE (16)..(20): Lactam ring between side chains at positions 16 and 20
HSQGTFTSDYSKYLDEQAAKEFIAWLMNT

SEQ ID NO: 84 - protein, 29 aa, Artificial Sequence
  Synthetic Polypeptide
  MISC_FEATURE: c-term amidation
HSQGTFTSDYSKYLDEQAAKEFIAWLVKG

SEQ ID NO: 85 - protein, 29 aa, Artificial Sequence
  Synthetic Polypeptide
  MISC_FEATURE: c-term amidation
  MISC_FEATURE (12)..(16): Lactam ring between side chains at positions 12 and 16
HSQGTFTSDYSKYLDEQAAKEFIAWLVKG

SEQ ID NO: 86 - protein, 29 aa, Artificial Sequence
  Synthetic Polypeptide
  MISC_FEATURE: c-term amidation
  MISC_FEATURE (16)..(20): Lactam ring between side chains at positions 16 and 20
HSQGTFTSDYSKYLDEQAAKEFIAWLVKG

SEQ ID NO: 87 - protein, 29 aa, Artificial Sequence
  Synthetic Polypeptide
  MISC_FEATURE: c-term amidation
  MOD_RES (1)..(1): (Des-amino)His
XSQGTFTSDYSKYLDERRAQDFVQWLMNT

SEQ ID NO: 88 - protein, 29 aa, Artificial Sequence
  Synthetic Polypeptide
  MISC_FEATURE: c-term amidation
  MOD_RES (1)..(1): (Des-amino)His
XSQGTFTSDYSKYLDERRAKDFVQWLMNT

SEQ ID NO: 89 - protein, 29 aa, Artificial Sequence
  Synthetic Polypeptide
  MISC_FEATURE: c-term amidation
  MOD_RES (1)..(1): (Des-amino)His
  MISC_FEATURE (16)..(20): Lactam ring between side chains at positions 16 and 20
XSQGTFTSDYSKYLDERRAKDFVQWLMNT

SEQ ID NO: 90 - protein, 29 aa, Artificial Sequence
  Synthetic Polypeptide
  MISC_FEATURE: c-term amidation
  MOD_RES (1)..(1): (Des-amino)His
  MISC_FEATURE (12)..(16): Lactam ring between side chains at positions 12 and 16
XSQGTFTSDYSKYLDERRAQDFVQWLMNT

SEQ ID NO: 91 - protein, 29 aa, Artificial Sequence
  Synthetic Polypeptide
  MISC_FEATURE: c-term amidation
  MOD_RES (1)..(1): (Des-amino)His
  MISC_FEATURE (12)..(16): Lactam ring between side chains at positions 12 and 16
XSQGTFTSDYSKYLDERRAKDFVQWLMNT

SEQ ID NO: 92 - protein, 29 aa, Artificial Sequence
  Synthetic Polypeptide
  MISC_FEATURE: c-term amidation
  MOD_RES (1)..(1): (Des-amino)His
  MISC_FEATURE (16)..(20): Lactam ring between side chains at positions 16 and 20
XSQGTFTSDYSKYLDKRRAEDFVQWLMNT

SEQ ID NO: 93 - protein, 29 aa, Artificial Sequence
  Synthetic Polypeptide
  MOD_RES (1)..(1): (Des-amino)His
  MISC_FEATURE (29)..(29): c-term amidation
XSQGTFTSDYSKYLDERAAKDFVQWLMNT

SEQ ID NO: 94 - protein, 29 aa, Artificial Sequence
  Synthetic Polypeptide
  MISC_FEATURE: c-term amidation
  MOD_RES (1)..(1): (Des-amino)His
  MISC_FEATURE (16)..(20): Lactam ring between side chains at positions 16 and 20
XSQGTFTSDYSKYLDERAAKDFVQWLMNT

SEQ ID NO: 95 - protein, 29 aa, Artificial Sequence
  Synthetic Polypeptide
  MISC_FEATURE: c-term amidation
  MOD_RES (1)..(1): (Des-amino)His
  MISC_FEATURE (12)..(16): Lactam ring between side chains at positions 12 and 16
XSQGTFTSDYSKYLDERAAQDFVQWLMNT

SEQ ID NO: 96 - protein, 29 aa, Artificial Sequence
  Synthetic Polypeptide
  MISC_FEATURE: c-term amidation
  MOD_RES (1)..(1): (Des-amino)His
  MISC_FEATURE (12)..(16): Lactam ring between side chains at positions 12 and 16
XSQGTFTSDYSKYLDERAAKDFVQWLMNT

SEQ ID NO: 97 - protein, 29 aa, Artificial Sequence
  Synthetic Polypeptide
  MISC_FEATURE: c-term amidation
  MOD_RES (1)..(1): (Des-amino)His
  MISC_FEATURE (16)..(20): Lactam ring between side chains at positions 16 and 20
XSQGTFTSDYSKYLDKRAAEDFVQWLMNT

SEQ ID NO: 98 - protein, 29 aa, Artificial Sequence
  Synthetic Polypeptide
  MISC_FEATURE: c-term amidation
  MOD_RES (1)..(1): (Des-amino)His
  MISC_FEATURE (12)..(16): Lactam ring between side chains at positions 12 and 16
XSQGTFTSDYSKYLDEQAAKEFIAWLMNT

SEQ ID NO: 99 - protein, 29 aa, Artificial Sequence
  Synthetic Polypeptide
  MISC_FEATURE: c-term amidation
  MOD_RES (1)..(1): (Des-amino)His
  MISC_FEATURE (12)..(16): Lactam ring between side chains at positions 12 and 16
XSQGTFTSDYSKYLDEQAAKEFIAWLMNT

SEQ ID NO: 100 - protein, 29 aa, Artificial Sequence
  Synthetic Polypeptide
  MISC_FEATURE: c-term amidation
  MOD_RES (1)..(1): (Des-amino)His
  MISC_FEATURE (16)..(20): Lactam ring between side chains at positions 16 and 20
XSQGTFTSDYSKYLDEQAAKEFIAWLMNT

SEQ ID NO: 101 - protein, 29 aa, Artificial Sequence
  Synthetic Polypeptide
  MISC_FEATURE: c-term amidation
  MOD_RES (1)..(1): (Des-amino)His
XSQGTFTSDYSKYLDEQAAKEFIAWLVKG

SEQ ID NO: 102 - protein, 29 aa, Artificial Sequence
  Synthetic Polypeptide
  MISC_FEATURE: c-term amidation
  MOD_RES (1)..(1): (Des-amino)His
  MISC_FEATURE (12)..(16): Lactam ring between side chains at positions 12 and 16
XSQGTFTSDYSKYLDEQAAKEFIAWLVKG

SEQ ID NO: 103 - protein, 29 aa, Artificial Sequence
  Synthetic Polypeptide
  MISC_FEATURE: c-term amidation
  MOD_RES (1)..(1): (Des-amino)His
  MISC_FEATURE (16)..(20): Lactam ring between side chains at positions 16 and 20
XSQGTFTSDYSKYLDEQAAKEFIAWLVKG

SEQ ID NO: 104 - protein, 29 aa, Artificial Sequence
  Synthetic Polypeptide
  MOD_RES (2)..(2): Aminoisobutyric acid
  MISC_FEATURE (29)..(29): c-term amidation
HXQGTFTSDYSKYLDERRAQDFVQWLMNT

SEQ ID NO: 105 - protein, 29 aa, Artificial Sequence
  Synthetic Polypeptide
  MISC_FEATURE: c-term amidation
  MOD_RES (2)..(2): Aminoisobutyric acid
  MISC_FEATURE (16)..(20): Lactam ring between side chains at positions 16 and 20
HXQGTFTSDYSKYLDERRAKDFVQWLMNT

SEQ ID NO: 106 - protein, 29 aa, Artificial Sequence
  Synthetic Polypeptide
  MISC_FEATURE: c-term amidation
  MOD_RES (2)..(2): Aminoisobutyric acid
  MISC_FEATURE (16)..(20): Lactam ring between side chains at positions 16 and 20
HXQGTFTSDYSKYLDERRAKDFVQWLMNT

SEQ ID NO: 107 - protein, 29 aa, Artificial Sequence
  Synthetic Polypeptide
  MISC_FEATURE: c-term amidation
  MOD_RES (2)..(2): Aminoisobutyric acid
  MISC_FEATURE (12)..(16): Lactam ring between side chains at positions 12 and 16
HXQGTFTSDYSKYLDERRAQDFVQWLMNT

SEQ ID NO: 108 - protein, 29 aa, Artificial Sequence
  Synthetic Polypeptide
  MISC_FEATURE: c-term amidation
  MOD_RES (2)..(2): Aminoisebutyric acid
  MISC_FEATURE (12)..(16): Lactam ring between side chains at positions 12 and 16
HXQGTFTSDYSKYLDERRAKDFVQWLMNT

SEQ ID NO: 109 - protein, 29 aa, Artificial Sequence
  Synthetic Polypeptide
  MISC_FEATURE: c-term amidation
  MOD_RES (2)..(2): Aminoisobutyric acid
  MISC_FEATURE (16)..(20): Lactam ring between side chains at positions 16 and 20
HXQGTFTSDYSKYLDKRRAEDFVQWLMNT

SEQ ID NO: 110 - protein, 29 aa, Artificial Sequence
  Synthetic Polypeptide
  MISC_FEATURE: c-term amidation
  MOD_RES (2)..(2): Aminoisobutyric acid
HXQGTFTSDYSKYLDERAAKDFVQWLMNT

SEQ ID NO: 111 - protein, 29 aa, Artificial Sequence
  Synthetic Polypeptide
  MISC_FEATURE: c-term amidation
  MOD_RES (2)..(2): Aminoisobutyric acid
  MISC_FEATURE (16)..(20): Lactam ring between side chains at positions 16 and 20
HXQGTFTSDYSKYLDERAAKDFVQWLMNT

SEQ ID NO: 112 - protein, 29 aa, Artificial Sequence
  Synthetic Polypeptide
  MISC_FEATURE: c-term amidation
  MOD_RES (2)..(2): Aminoisobutryic acid
  MISC_FEATURE (12)..(16): Lactam ring between side chains at positions 12 and 16
HXQGTFTSDYSKYLDERAAQDFVQWLMNT

SEQ ID NO: 113 - protein, 29 aa, Artificial Sequence
  glucagon analog
  MISC_FEATURE: c-term amidation
  MOD_RES (2)..(2): Aminoisobutryic acid
  MISC_FEATURE (12)..(16): Lactam ring between side chains at positions 12 and 16
HXQGTFTSDYSKYLDERAAKDFVQWLMNT

SEQ ID NO: 114 - protein, 29 aa, Artificial Sequence
  glucagon analog
  MISC_FEATURE: c-term amidation
  MOD_RES (2)..(2): Aminoisobutryic acid
  MISC_FEATURE (16)..(20): Lactam ring between side chains at positions 16 and 20
HXQGTFTSDYSKYLDKRAAEDFVQWLMNT

SEQ ID NO: 115 - protein, 29 aa, Artificial Sequence
  glucagon analog
  MISC_FEATURE: c-term amidation
  MOD_RES (2)..(2): Aminoisobutyric acid
HXQGTFTSDYSKYLDEQAAKEFIAWLMNT

SEQ ID NO: 116 - protein, 29 aa, Artificial Sequence
  glucagon analog
  MISC_FEATURE: c-term amidation
  MOD_RES (2)..(2): Aminoisobutryic acid
  MISC_FEATURE (12)..(16): Lactam ring between side chains at positions 12 and 16
HXQGTFTSDYSKYLDEQAAKEFIAWLMNT

SEQ ID NO: 117 - protein, 29 aa, Artificial Sequence
  glucagon analog
  MISC_FEATURE: c-term amidation
  MOD_RES (2)..(2): Aminoisobutryic acid
  MISC_FEATURE (16)..(20): Lactam ring between side chains at positions 16 and 20
HXQGTFTSDYSKYLDEQAAKEFIAWLMNT

SEQ ID NO: 118 - protein, 29 aa, Artificial Sequence
  glucagon analog
  MISC_FEATURE: c-term amidation
  MOD_RES (2)..(2): Aminoisobutyric acid
HXQGTFTSDYSKYLDEQAAKEFIAWLVKG

SEQ ID NO: 119 - protein, 29 aa, Artificial Sequence
  glucagon analog
  MISC_FEATURE: c-term amidation
  MOD_RES (2)..(2): Aminoisobutyric acid
  MISC_FEATURE (12)..(16): Lactam ring between side chains at positions 12 and 16
HXQGTFTSDYSKYLDEQAAKEFIAWLVKG

SEQ ID NO: 120 - protein, 29 aa, Artificial Sequence
  glucagon analog
  MISC_FEATURE: c-term amidation
  MOD_RES (2)..(2): Aminoisobutyric acid
  MISC_FEATURE (16)..(20): Lactam ring between side chains at positions 16 and 20
HXQGTFTSDYSKYLDEQAAKEFIAWLVKG

SEQ ID NO: 121 - protein, 29 aa, Artificial Sequence
  glucagon analog
  MISC_FEATURE: c-term amidation
  MOD_RES (2)..(2): D-Ala
HXQGTFTSDYSKYLDERRAQDFVQWLMNT

SEQ ID NO: 122 - protein, 29 aa, Artificial Sequence
  glucagon analog
  MISC_FEATURE: c-term amidation
  MOD_RES (2)..(2): D-Ala
HXQGTFTSDYSKYLDERRAKDFVQWLMNT

SEQ ID NO: 123 - protein, 29 aa, Artificial Sequence
  glucagon analog
  MISC_FEATURE: c-term amidation
  MOD_RES (2)..(2): D-Ala
  MISC_FEATURE (16)..(20): Lactam ring between side chains at positions 16 and 20
HXQGTFTSDYSKYLDERRAKDFVQWLMNT

SEQ ID NO: 124 - protein, 29 aa, Artificial Sequence
  glucagon analog
  MISC_FEATURE: c-term amidation
  MOD_RES (2)..(2): D-Ala
  MISC_FEATURE (12)..(16): Lactam ring between side chains at positions 12 and 16
HXQGTFTSDYSKYLDERRAQDFVQWLMNT

SEQ ID NO: 125 - protein, 29 aa, Artificial Sequence
  glucagon analog
  MISC_FEATURE: c-term amidation
  MOD_RES (2)..(2): D-Ala
  MISC_FEATURE (12)..(16): Lactam ring between side chains at positions 12 and 16
HXQGTFTSDYSKYLDERRAKDFVQWLMNT

SEQ ID NO: 126 - protein, 29 aa, Artificial Sequence
  glucagon analog
  MISC_FEATURE: c-term amidation
  MOD_RES (2)..(2): D-Ala
  MISC_FEATURE (16)..(20): Lactam ring between side chains at positions 16 and 20
HXQGTFTSDYSKYLDKRRAEDFVQWLMNT

SEQ ID NO: 127 - protein, 29 aa, Artificial Sequence
  glucagon analog
  MISC_FEATURE: c-term amidation
  MOD_RES (2)..(2): D-Ala
HXQGTFTSDYSKYLDERAAKDFVQWLMNT

SEQ ID NO: 128 - protein, 29 aa, Artificial Sequence
  glucagon analog
  MISC_FEATURE: c-term amidation
  MOD_RES (2)..(2): D-Ala
  MISC_FEATURE (16)..(20): Lactam ring between side chains at positions 16 and 20
HXQGTFTSDYSKYLDERAAKDFVQWLMNT

SEQ ID NO: 129 - protein, 29 aa, Artificial Sequence
  glucagon analog
  MISC_FEATURE: c-term amidation
  MOD_RES (2)..(2): D-Ala
  MISC_FEATURE (12)..(16): Lactam ring between side chains at positions 12 and 16
HXQGTFTSDYSKYLDERAAQDFVQWLMNT

SEQ ID NO: 130 - protein, 29 aa, Artificial Sequence
  glucagon analog
  MISC_FEATURE: c-term amidation
  MOD_RES (2)..(2): D-Ala
  MISC_FEATURE (12)..(16): Lactam ring between side chains at positions 12 and 16
HXQGTFTSDYSKYLDERAAKDFVQWLMNT

SEQ ID NO: 131 - protein, 29 aa, Artificial Sequence
  glucagon analog
  MISC_FEATURE: c-term amidation
  MOD_RES (2)..(2): D-Ala
  MISC_FEATURE (16)..(20): Lactam ring between side chains at positions 16 and 20
HXQGTFTSDYSKYLDKRAAEDFVQWLMNT

SEQ ID NO: 132 - protein, 29 aa, Artificial Sequence
  glucagon analog
  MISC_FEATURE: c-term amidation
  MOD_RES (2)..(2): D-Ala
HXQGTFTSDYSKYLDEQAAKEFIAWLMNT

SEQ ID NO: 133 - protein, 29 aa, Artificial Sequence
  glucagon analog
  MISC_FEATURE: c-term amidation
  MOD_RES (2)..(2): D-Ala
  MISC_FEATURE (12)..(16): Lactam ring between side chains at positions 12 and 16
HXQGTFTSDYSKYLDEQAAKEFIAWLMNT

SEQ ID NO: 134 - protein, 29 aa, Artificial Sequence
  glucagon analog
  MISC_FEATURE: c-term amidation
  MOD_RES (2)..(2): D-Ala
  MISC_FEATURE (16)..(20): Lactam ring between side chains at positions 16 and 20
HXQGTFTSDYSKYLDEQAAKEFIAWLMNT

SEQ ID NO: 135 - protein, 29 aa, Artificial Sequence
  glucagon analog
  MISC_FEATURE: c-term amidation
  MOD_RES (2)..(2): D-Ala
HXQGTFTSDYSKYLDEQAAKEFIAWLVKG

SEQ ID NO: 136 - protein, 29 aa, Artificial Sequence
  glucagon analog
  MISC_FEATURE: c-term amidation
  MOD_RES (2)..(2): D-Ala
  MISC_FEATURE (12)..(16): Lactam ring between side chains at positions 12 and 16
HXQGTFTSDYSKYLDEQAAKEFIAWLVKG

SEQ ID NO: 137 - protein, 29 aa, Artificial Sequence
  glucagon analog
  MISC_FEATURE: c-term amidation
  MOD_RES (2)..(2): D-Ala
  MISC_FEATURE (16)..(20): Lactam ring between side chains at positions 16 and 20
HXQGTFTSDYSKYLDEQAAKEFIAWLVKG

SEQ ID NO: 138 - protein, 29 aa, Artificial Sequence
  glucagon analog
  MISC_FEATURE: c-term amidation
HSEGTFTSDYSKYLDERRAQDFVQWLMNT

SEQ ID NO: 139 - protein, 29 aa, Artificial Sequence
  glucagon analog
  MISC_FEATURE: c-term amidation
HSEGTFTSDYSKYLDERRAKDFVQWLMNT

SEQ ID NO: 140 - protein, 29 aa, Artificial Sequence
  glucagon analog
  MISC_FEATURE: c-term amidation
  MISC_FEATURE (16)..(20): Lactam ring between side chains at positions 16 and 20
HSEGTFTSDYSKYLDERRAKDFVQWLMNT

SEQ ID NO: 141 - protein, 29 aa, Artificial Sequence
  glucagon analog
  MISC_FEATURE: c-term amidation
  MISC_FEATURE (12)..(16): Lactam ring between side chains at positions 12 and 16
HSEGTFTSDYSKYLDERRAQDFVQWLMNT

SEQ ID NO: 142 - protein, 29 aa, Artificial Sequence
  glucagon analog
  MISC_FEATURE: c-term amidation
  MISC_FEATURE (12)..(16): Lactam ring between side chains at positions 12 and 16
HSEGTFTSDYSKYLDERRAKDFVQWLMNT

SEQ ID NO: 143 - protein, 29 aa, Artificial Sequence
  glucagon analog
  MISC_FEATURE: c-term amidation
  MISC_FEATURE (16)..(20): Lactam ring between side chains at positions 16 and 20
HSEGTFTSDYSKYLDKRRAEDFVQWLMNT

SEQ ID NO: 144 - protein, 29 aa, Artificial Sequence
  glucagon analog
  MISC_FEATURE: c-term amidation
HSEGTFTSDYSKYLDERAAKDFVQWLMNT

SEQ ID NO: 145 - protein, 29 aa, Artificial Sequence
  glucagon analog
  MISC_FEATURE: c-term amidation
  MISC_FEATURE (16)..(20): Lactam ring between side chains at positions 16 and 20
HSEGTFTSDYSKYLDERAAKDFVQWLMNT

SEQ ID NO: 146 - protein, 29 aa, Artificial Sequence
  glucagon analog
  MISC_FEATURE: c-term amidation
  MISC_FEATURE (12)..(16): Lactam ring between side chains at positions 12 and 16
HSEGTFTSDYSKYLDERAAQDFVQWLMNT

SEQ ID NO: 147 - protein, 29 aa, Artificial Sequence
  glucagon analog
  MISC_FEATURE: c-term amidation
  MISC_FEATURE (12)..(16): Lactam ring between side chains at positions 12 and 16
HSEGTFTSDYSKYLDERAAKDFVQWLMNT

SEQ ID NO: 148 - protein, 29 aa, Artificial Sequence
  glucagon analog
  MISC_FEATURE: c-term amidation
  MISC_FEATURE (16)..(20): Lactam ring between side chains at positions 16 and 20
HSEGTFTSDYSKYLDKRAAEDFVQWLMNT

SEQ ID NO: 149 - protein, 29 aa, Artificial Sequence
  glucagon analog
  MISC_FEATURE: c-term amidation
HSEGTFTSDYSKYLDEQAAKEFIAWLMNT

SEQ ID NO: 150 - protein, 29 aa, Artificial Sequence
  glucagon analog
  MISC_FEATURE: c-term amidation
  MISC_FEATURE (12)..(16): Lactam ring between side chains at positions 12 and 16
HSEGTFTSDYSKYLDEQAAKEFIAWLMNT

SEQ ID NO: 151 - protein, 29 aa, Artificial Sequence
  glucagon analog
  MISC_FEATURE: c-term amidation
  MISC_FEATURE (16)..(20): Lactam ring between side chains at positions 16 and 20
HSEGTFTSDYSKYLDEQAAKEFIAWLMNT

SEQ ID NO: 152 - protein, 29 aa, Artificial Sequence
  glucagon analog
  MISC_FEATURE: c-term amidation
HSEGTFTSDYSKYLDEQAAKEFIAWLVKG

SEQ ID NO: 153 - protein, 29 aa, Artificial Sequence
  glucagon analog
  MISC_FEATURE: c-term amidation
  MISC_FEATURE (12)..(16): Lactam ring between side chains at positions 12 and 16
HSEGTFTSDYSKYLDEQAAKEFIAWLVKG

SEQ ID NO: 154 - protein, 29 aa, Artificial Sequence
  glucagon analog
  MISC_FEATURE: c-term amidation
  MISC_FEATURE (16)..(20): Lactam ring between side chains at positions 16 and 20
HSEGTFTSDYSKYLDEQAAKEFIAWLVKG

SEQ ID NO: 155 - protein, 29 aa, Artificial Sequence
  glucagon analog
  MISC_FEATURE: c-term amidation
  MOD_RES (1)..(1): (Des-amino)His
XSEGTFTSDYSKYLDERRAQDFVQWLMNT

SEQ ID NO: 156 - protein, 29 aa, Artificial Sequence
  glucagon analog
  MISC_FEATURE: c-term amidation
  MOD_RES (1)..(1): (Des-amino)His
XSEGTFTSDYSKYLDERRAKDFVQWLMNT

SEQ ID NO: 157 - protein, 29 aa, Artificial Sequence
  glucagon analog
  MISC_FEATURE: c-term amidation
  MOD_RES (1)..(1): (Des-amino)His
  MISC_FEATURE (16)..(20): Lactam ring between side chains at positions 16 and 20
XSEGTFTSDYSKYLDERRAKDFVQWLMNT

SEQ ID NO: 158 - protein, 29 aa, Artificial Sequence
  glucagon analog
  MISC_FEATURE: c-term amidation
  MOD_RES (1)..(1): (Des-amino)His
  MISC_FEATURE (12)..(16): Lactam ring between side chains at positions 12 and 16
XSEGTFTSDYSKYLDERRAQDFVQWLMNT

SEQ ID NO: 159 - protein, 29 aa, Artificial Sequence
  glucagon analog
  MISC_FEATURE: c-term amidation
  MOD_RES (1)..(1): (Des-amino)His
  MISC_FEATURE (12)..(16): Lactam ring between side chains at positions 12 and 16
XSEGTFTSDYSKYLDERRAKDFVQWLMNT

SEQ ID NO: 160 - protein, 29 aa, Artificial Sequence
  glucagon analog
  MISC_FEATURE: c-term amidation
  MOD_RES (1)..(1): (Des-amino)His
  MISC_FEATURE (16)..(20): Lactam ring between side chains at positions 16 and 20
XSEGTFTSDYSKYLDKRRAEDFVQWLMNT

SEQ ID NO: 161 - protein, 29 aa, Artificial Sequence
  glucagon analog
  MISC_FEATURE: c-term amidation
  MOD_RES (1)..(1): (Des-amino)His
XSEGTFTSDYSKYLDERAAKDFVQWLMNT

SEQ ID NO: 162 - protein, 29 aa, Artificial Sequence
  glucagon analog
  MISC_FEATURE: c-term amidation
  MOD_RES (1)..(1): (Des-amino)His
  MISC_FEATURE (16)..(20): Lactam ring between side chains at positions 16 and 20
XSEGTFTSDYSKYLDERAAKDFVQWLMNT

SEQ ID NO: 163 - protein, 29 aa, Artificial Sequence
  glucagon analog
  MISC_FEATURE: c-term amidation
  MOD_RES (1)..(1): (Des-amino)His
  MISC_FEATURE (12)..(16): Lactam ring between side chains at positions 12 and 16
XSEGTFTSDYSKYLDERAAQDFVQWLMNT

SEQ ID NO: 164 - protein, 29 aa, Artificial Sequence
  glucagon analog
  MISC_FEATURE: c-term amidation
  MOD_RES (1)..(1): (Des-amino)His
  MISC_FEATURE (12)..(16): Lactam ring between side chains at positions 12 and 16
XSEGTFTSDYSKYLDERAAKDFVQWLMNT

SEQ ID NO: 165 - protein, 29 aa, Artificial Sequence
  glucagon analog
  MISC_FEATURE: c-term amidation
  MOD_RES (1)..(1): (Des-amino)His
  MISC_FEATURE (16)..(20): Lactam ring between side chains at positions 16 and 20
XSEGTFTSDYSKYLDKRAAEDFVQWLMNT

SEQ ID NO: 166 - protein, 29 aa, Artificial Sequence
  glucagon analog
  MISC_FEATURE: c-term amidation
  MOD_RES (1)..(1): (Des-amino)His
XSEGTFTSDYSKYLDEQAAKEFIAWLMNT

SEQ ID NO: 167 - protein, 29 aa, Artificial Sequence
  glucagon analog
  MISC_FEATURE: c-term amidation
  MOD_RES (1)..(1): (Des-amino)His
  MISC_FEATURE (12)..(16): Lactam ring between side chains at positions 12 and 16
XSEGTFTSDYSKYLDEQAAKEFIAWLMNT

SEQ ID NO: 168 - protein, 29 aa, Artificial Sequence
  glucagon analog
  MISC_FEATURE: c-term amidation
  MOD_RES (1)..(1): (Des-amino)His
  MISC_FEATURE (16)..(20): Lactam ring between side chains at positions 16 and 20
XSEGTFTSDYSKYLDEQAAKEFIAWLMNT

SEQ ID NO: 169 - protein, 29 aa, Artificial Sequence
  glucagon analog
  MISC_FEATURE: c-term amidation
  MOD_RES (1)..(1): (Des-amino)His
XSEGTFTSDYSKYLDEQAAKEFIAWLVKG

SEQ ID NO: 170 - protein, 29 aa, Artificial Sequence
  glucagon analog
  MISC_FEATURE: c-term amidation
  MOD_RES (1)..(1): (Des-amino)His
  MISC_FEATURE (12)..(16): Lactam ring between side chains at positions 12 and 16
XSEGTFTSDYSKYLDEQAAKEFIAWLVKG

SEQ ID NO: 171 - protein, 29 aa, Artificial Sequence
  glucagon analog
  MISC_FEATURE: c-term amidation
  MOD_RES (1)..(1): (Des-amino)His
  MISC_FEATURE (16)..(20): Lactam ring between side chains at positions 16 and 20
XSEGTFTSDYSKYLDEQAAKEFIAWLVKG

SEQ ID NO: 172 - protein, 29 aa, Artificial Sequence
  glucagon analog
  MISC_FEATURE: c-term amidation
  MOD_RES (2)..(2): Aminoisobutyric acid
HXEGTFTSDYSKYLDERRAQDFVQWLMNT

SEQ ID NO: 173 - protein, 29 aa, Artificial Sequence
  glucagon analog
  MISC_FEATURE: c-term amidation
  MOD_RES (2)..(2): Aminoisobutyric acid
HXEGTFTSDYSKYLDERRAKDFVQWLMNT

SEQ ID NO: 174 - protein, 29 aa, Artificial Sequence
  glucagon analog
  MISC_FEATURE: c-term amidation
  MOD_RES (2)..(2): Aminoisobutyric acid
  MISC_FEATURE (16)..(20): Lactam ring between side chains at positions 16 and 20
HXEGTFTSDYSKYLDERRAKDFVQWLMNT

SEQ ID NO: 175 - protein, 29 aa, Artificial Sequence
  glucagon analog
  MISC_FEATURE: c-term amidation
  MOD_RES (2)..(2): Aminoisobutyric acid
  MISC_FEATURE (12)..(16): Lactam ring between side chains at positions 12 and 16
HXEGTFTSDYSKYLDERRAQDFVQWLMNT

SEQ ID NO: 176 - protein, 29 aa, Artificial Sequence
  glucagon analog
  MISC_FEATURE: c-term amidation
  MOD_RES (2)..(2): Aminoisobutyric acid
  MISC_FEATURE (12)..(16): Lactam ring between side chains at positions 12 and 16
HXEGTFTSDYSKYLDERRAKDFVQWLMNT

SEQ ID NO: 177 - protein, 29 aa, Artificial Sequence
  glucagon analog
  MISC_FEATURE: c-term amidation
  MOD_RES (2)..(2): Aminoisobutyric acid
  MISC_FEATURE (16)..(20): Lactam ring between side chains at positions 16 and 20
HXEGTFTSDYSKYLDKRRAEDFVQWLMNT

SEQ ID NO: 178 - protein, 29 aa, Artificial Sequence
  glucagon analog
  MISC_FEATURE: c-term amidation
  MOD_RES (2)..(2): Aminoisobutyric acid
HXEGTFTSDYSKYLDERAAKDFVQWLMNT

SEQ ID NO: 179 - protein, 29 aa, Artificial Sequence
  glucagon analog
  MISC_FEATURE: c-term amidation
  MOD_RES (2)..(2): Aminoisobutyric acid
  MISC_FEATURE (16)..(20): Lactam ring between side chains at positions 16 and 20
HXEGTFTSDYSKYLDERAAKDFVQWLMNT

SEQ ID NO: 180 - protein, 29 aa, Artificial Sequence
  glucagon analog
  MISC_FEATURE: c-term amidation
  MOD_RES (2)..(2): Aminoisobutyric acid
  MISC_FEATURE (12)..(16): Lactam ring between side chains at positions 12 and 16
HXEGTFTSDYSKYLDERAAQDFVQWLMNT

SEQ ID NO: 181 - protein, 29 aa, Artificial Sequence
  glucagon analog
  MISC_FEATURE: c-term amidation
  MOD_RES (2)..(2): Aminoisobutyric acid
  MISC_FEATURE (12)..(16): Lactam ring between side chains at positions 12 and 16
HXEGTFTSDYSKYLDERAAKDFVQWLMNT

SEQ ID NO: 182 - protein, 29 aa, Artificial Sequence
  glucagon analog
  MISC_FEATURE: c-term amidation
  MOD_RES (2)..(2): Aminoisobutyric acid
  MISC_FEATURE (16)..(20): Lactam ring between side chains at positions 16 and 20
HXEGTFTSDYSKYLDKRAAEDFVQWLMNT

SEQ ID NO: 183 - protein, 29 aa, Artificial Sequence
  glucagon analog
  MISC_FEATURE: c-term amidation
  MOD_RES (2)..(2): Aminoisobutyric acid
HXEGTFTSDYSKYLDEQAAKEFIAWLMNT

SEQ ID NO: 184 - protein, 29 aa, Artificial Sequence
  glucagon analog
  MISC_FEATURE: c-term amidation
  MOD_RES (2)..(2): Aminoisobutyric acid
  MISC_FEATURE (12)..(16): Lactam ring between side chains at positions 12 and 16
HXEGTFTSDYSKYLDEQAAKEFIAWLMNT

SEQ ID NO: 185 - protein, 29 aa, Artificial Sequence
  glucagon analog
  MISC_FEATURE: c-term amidation
  MOD_RES (2)..(2): Aminoisobutyric acid
  MISC_FEATURE (16)..(20): Lactam ring between side chains at positions 16 and 20
HXEGTFTSDYSKYLDEQAAKEFIAWLMNT

SEQ ID NO: 186 - protein, 29 aa, Artificial Sequence
  glucagon analog
  MISC_FEATURE: c-term amidation
  MOD_RES (2)..(2): Aminoisobutyric acid
HXEGTFTSDYSKYLDEQAAKEFIAWLVKG

SEQ ID NO: 187 - protein, 29 aa, Artificial Sequence
  glucagon analog
  MISC_FEATURE: c-term amidation
  MOD_RES (2)..(2): Aminoisobutyric acid
  MISC_FEATURE (12)..(16): Lactam ring between side chains at positions 12 and 16
HXEGTFTSDYSKYLDEQAAKEFIAWLVKG

SEQ ID NO: 188 - protein, 29 aa, Artificial Sequence
  glucagon analog
  MISC_FEATURE: c-term amidation
  MOD_RES (2)..(2): Aminoisobutyric acid
  MISC_FEATURE (16)..(20): Lactam ring between side chains at positions 16 and 20
HXEGTFTSDYSKYLDEQAAKEFIAWLVKG

SEQ ID NO: 189 - protein, 29 aa, Artificial Sequence
  glucagon analog
  MISC_FEATURE: c-term amidation
  MOD_RES (2)..(2): D-Ala
HXEGTFTSDYSKYLDERRAQDFVQWLMNT

SEQ ID NO: 190 - protein, 29 aa, Artificial Sequence
  glucagon analog
  MISC_FEATURE: c-term amidation
  MOD_RES (2)..(2): D-Ala
HXEGTFTSDYSKYLDERRAKDFVQWLMNT

SEQ ID NO: 191 - protein, 29 aa, Artificial Sequence
  glucagon analog
  MISC_FEATURE: c-term amidation
  MOD_RES (2)..(2): D-Ala
  MISC_FEATURE (16)..(20): Lactam ring between side chains at positions 16 and 20
HXEGTFTSDYSKYLDERRAKDFVQWLMNT

SEQ ID NO: 192 - protein, 29 aa, Artificial Sequence
  glucagon analog
  MISC_FEATURE: c-term amidation
  MOD_RES (2)..(2): D-Ala
  MISC_FEATURE (12)..(16): Lactam ring between side chains at positions 12 and 16
HXEGTFTSDYSKYLDERRAQDFVQWLMNT

SEQ ID NO: 193 - protein, 29 aa, Artificial Sequence
  glucagon analog
  MISC_FEATURE: c-term amidation
  MOD_RES (2)..(2): D-Ala
  MISC_FEATURE (12)..(16): Lactam ring between side chains at positions 12 and 16
HXEGTFTSDYSKYLDERRAKDFVQWLMNT

SEQ ID NO: 194 - protein, 29 aa, Artificial Sequence
  glucagon analog
  MISC_FEATURE: c-term amidation
  MOD_RES (2)..(2): D-Ala
  MISC_FEATURE (16)..(20): Lactam ring between side chains at positions 16 and 20
HXEGTFTSDYSKYLDKRRAEDFVQWLMNT

SEQ ID NO: 195 - protein, 29 aa, Artificial Sequence
  glucagon analog
  MISC_FEATURE: c-term amidation
  MOD_RES (2)..(2): D-Ala
  MISC_FEATURE (16)..(20): Lactam ring between side chains at positions 16 and 20
HXEGTFTSDYSKYLDERAAKDFVQWLMNT

SEQ ID NO: 196 - protein, 29 aa, Artificial Sequence
  glucagon analog
  MISC_FEATURE: c-term amidation
  MOD_RES (2)..(2): D-Ala
  MISC_FEATURE (16)..(20): Lactam ring between side chains at positions 16 and 20
HXEGTFTSDYSKYLDERAAKDFVQWLMNT

SEQ ID NO: 197 - protein, 29 aa, Artificial Sequence
  glucagon analog
  MISC_FEATURE: c-term amidation
  MOD_RES (2)..(2): D-Ala
  MISC_FEATURE (12)..(16): Lactam ring between side chains at positions 12 and 16
HXEGTFTSDYSKYLDERAAQDFVQWLMNT

SEQ ID NO: 198 - protein, 29 aa, Artificial Sequence
  glucagon analog
  MISC_FEATURE: c-term amidation
  MOD_RES (2)..(2): D-Ala
  MISC_FEATURE (12)..(16): Lactam ring between side chains at positions 12 and 16
HXEGTFTSDYSKYLDERAAKDFVQWLMNT

SEQ ID NO: 199 - protein, 29 aa, Artificial Sequence
  glucagon analog
  MISC_FEATURE: c-term amidation
  MOD_RES (2)..(2): D-Ala
  MISC_FEATURE (16)..(20): Lactam ring between side chains at positions 16 and 20
HXEGTFTSDYSKYLDKRAAEDFVQWLMNT

SEQ ID NO: 200 - protein, 29 aa, Artificial Sequence
  glucagon analog
  MISC_FEATURE: c-term amidation
  MOD_RES (2)..(2): D-Ala
HXEGTFTSDYSKYLDEQAAKEFIAWLMNT

SEQ ID NO: 201 - protein, 29 aa, Artificial Sequence
  glucagon analog
  MISC_FEATURE: c-term amidation
  MOD_RES (2)..(2): D-Ala
  MISC_FEATURE (12)..(16): Lactam ring between side chains at positions 12 and 16
HXEGTFTSDYSKYLDEQAAKEFIAWLMNT

SEQ ID NO: 202 - protein, 29 aa, Artificial Sequence
  glucagon analog
  MISC_FEATURE: c-term amidation
  MOD_RES (2)..(2): D-Ala
  MISC_FEATURE (16)..(20): Lactam ring between side chains at positions 16 and 20
HXEGTFTSDYSKYLDEQAAKEFIAWLMNT

SEQ ID NO: 203 - protein, 29 aa, Artificial Sequence
  glucagon analog
  MISC_FEATURE: c-term amidation
  MOD_RES (2)..(2): D-Ala
HXEGTFTSDYSKYLDEQAAKEFIAWLVKG

SEQ ID NO: 204 - protein, 29 aa, Artificial Sequence
  glucagon analog
  MISC_FEATURE: c-term amidation
  MOD_RES (2)..(2): D-Ala
  MISC_FEATURE (12)..(16): Lactam ring between side chains at positions 12 and 16
HXEGTFTSDYSKYLDEQAAKEFIAWLVKG

SEQ ID NO: 205 - protein, 29 aa, Artificial Sequence
  glucagon analog
  MISC_FEATURE: Lactam ring between side chains at positions 16 and 20
  MOD_RES (2)..(2): D-Ala
  MISC_FEATURE (16)..(20): c-term amidation
HXEGTFTSDYSKYLDEQAAKEFIAWLVKG

SEQ ID NO: 206 - protein, 29 aa, Artificial Sequence
  glucagon analog
  MISC_FEATURE: c-term amidation
  MOD_RES (24)..(24): Cys-PEG
HSQGTFTSDYSKYLDERRAQDFVCWLMNT

SEQ ID NO: 207 - protein, 29 aa, Artificial Sequence
  glucagon analog
  MISC_FEATURE: c-term amidation
  MOD_RES (24)..(24): Cys-PEG
HSQGTFTSDYSKYLDERRAKDFVCWLMNT

SEQ ID NO: 208 - protein, 29 aa, Artificial Sequence
  glucagon analog
  MISC_FEATURE: c-term amidation
  MISC_FEATURE (16)..(20): Lactam ring between side chains at positions 16 and 20
  MOD_RES (24)..(24): Cys-PEG
HSQGTFTSDYSKYLDERRAKDFVCWLMNT

SEQ ID NO: 209 - protein, 29 aa, Artificial Sequence
  glucagon analog
  MISC_FEATURE: c-term amidation
  MISC_FEATURE (12)..(16): Lactam ring between side chains at positions 12 and 16
  MOD_RES (24)..(24): Cys-PEG
HSQGTFTSDYSKYLDERRAQDFVCWLMNT

SEQ ID NO: 210 - protein, 29 aa, Artificial Sequence
  glucagon analog
  MISC_FEATURE: c-term amidation
  MISC_FEATURE (12)..(16): Lactam ring between side chains at positions 12 and 16
  MOD_RES (24)..(24): Cys-PEG
HSQGTFTSDYSKYLDERRAKDFVCWLMNT

SEQ ID NO: 211 - protein, 29 aa, Artificial Sequence
  glucagon analog
  MISC_FEATURE: c-term amidation
  MISC_FEATURE (16)..(20): Lactam ring between side chains at positions 16 and 20
  MOD_RES (24)..(24): Cys-PEG
HSQGTFTSDYSKYLDKRRAEDFVCWLMNT

SEQ ID NO: 212 - protein, 29 aa, Artificial Sequence
  glucagon analog
  MISC_FEATURE: c-term amidation
  MISC_FEATURE (16)..(20): Lactam ring between side chains at positions 16 and 20
  MOD_RES (24)..(24): Cys-PEG
HSQGTFTSDYSKYLDERAAKDFVCWLMNT

SEQ ID NO: 213 - protein, 29 aa, Artificial Sequence
  glucagon analog
  MISC_FEATURE: c-term amidation
  MISC_FEATURE (16)..(20): Lactam ring between side chains at positions 16 and 20
  MOD_RES (24)..(24): Cys-PEG
HSQGTFTSDYSKYLDERAAKDFVCWLMNT

SEQ ID NO: 214 - protein, 29 aa, Artificial Sequence
  glucagon analog
  MISC_FEATURE: c-term amidation
  MISC_FEATURE (12)..(16): Lactam ring between side chains at positions 12 and 16
  MOD_RES (24)..(24): Cys-PEG
HSQGTFTSDYSKYLDERAAQDFVCWLMNT

SEQ ID NO: 215 - protein, 29 aa, Artificial Sequence
  glucagon analog
  MISC_FEATURE: c-term amidation
  MISC_FEATURE (12)..(16): Lactam ring between side chains at positions 12 and 16
  MOD_RES (24)..(24): Cys-PEG
HSQGTFTSDYSKYLDERAAKDFVCWLMNT

SEQ ID NO: 216 - protein, 29 aa, Artificial Sequence
  glucagon analog
  MISC_FEATURE: c-term amidation
  MISC_FEATURE (16)..(20): Lactam ring between side chains at positions 16 and 20
  MOD_RES (24)..(24): Cys-PEG
HSQGTFTSDYSKYLDKRAAEDFVCWLMNT

SEQ ID NO: 217 - protein, 29 aa, Artificial Sequence
  glucagon analog
  MISC_FEATURE: c-term amidation
  MOD_RES (24)..(24): Cys-PEG
HSQGTFTSDYSKYLDEQAAKEFICWLMNT

SEQ ID NO: 218 - protein, 29 aa, Artificial Sequence
  glucagon analog
  MISC_FEATURE: c-term amidation
  MISC_FEATURE (12)..(16): Lactam ring between side chains at positions 12 and 16
  MOD_RES (24)..(24): Cys-PEG
HSQGTFTSDYSKYLDEQAAKEFICWLMNT

SEQ ID NO: 219 - protein, 29 aa, Artificial Sequence
  glucagon analog
  MISC_FEATURE: c-term amidation
  MISC_FEATURE (16)..(20): Lactam ring between side chains at positions 16 and 20
  MOD_RES (24)..(24): Cys-PEG
HSQGTFTSDYSKYLDEQAAKEFICWLMNT

SEQ ID NO: 220 - protein, 29 aa, Artificial Sequence
  glucagon analog
  MISC_FEATURE: c-term amidation
  MOD_RES (24)..(24): Cys-PEG
HSQGTFTSDYSKYLDEQAAKEFICWLVKG

SEQ ID NO: 221 - protein, 29 aa, Artificial Sequence
  glucagon analog
  MISC_FEATURE: c-term amidation
  MISC_FEATURE (12)..(16): Lactam ring between side chains at positions 12 and 16
  MOD_RES (24)..(24): Cys-PEG
HSQGTFTSDYSKYLDEQAAKEFICWLVKG

SEQ ID NO: 222 - protein, 29 aa, Artificial Sequence
  glucagon analog
  MISC_FEATURE: c-term amidation
  MISC_FEATURE (16)..(20): Lactam ring between side chains at positions 16 and 20
  MOD_RES (24)..(24): Cys-PEG
HSQGTFTSDYSKYLDEQAAKEFICWLVKG

SEQ ID NO: 223 - protein, 29 aa, Artificial Sequence
  glucagon analog
  MISC_FEATURE: c-term amidation
  MOD_RES (1)..(1): (Des-amino)His
  MOD_RES (24)..(24): Cys-PEG
XSQGTFTSDYSKYLDERRAQDFVCWLMNT

SEQ ID NO: 224 - protein, 29 aa, Artificial Sequence
  glucagon analog
  MISC_FEATURE: c-term amidation
  MOD_RES (1)..(1): (Des-amino)His
  MOD_RES (24)..(24): Cys-PEG
XSQGTFTSDYSKYLDERRAKDFVCWLMNT

SEQ ID NO: 225 - protein, 29 aa, Artificial Sequence
  glucagon analog
  MISC_FEATURE: c-term amidation
  MOD_RES (1)..(1): (Des-amino)His
  MISC_FEATURE (16)..(20): Lactam ring between side chains at positions 16 and 20
  MOD_RES (24)..(24): Cys-PEG
XSQGTFTSDYSKYLDERRAKDFVCWLMNT

SEQ ID NO: 226 - protein, 29 aa, Artificial Sequence
  glucagon analog
  MISC_FEATURE: c-term amidation
  MOD_RES (1)..(1): (Des-amino)His
  MISC_FEATURE (12)..(16): Lactam ring between side chains at positions 12 and 16
  MOD_RES (24)..(24): Cys-PEG
XSQGTFTSDYSKYLDERRAQDFVCWLMNT

SEQ ID NO: 227 - protein, 29 aa, Artificial Sequence
  glucagon analog
  MISC_FEATURE: c-term amidation
  MOD_RES (1)..(1): (Des-amino)His
  MISC_FEATURE (12)..(16): Lactam ring between side chains at positions 12 and 16
  MOD_RES (24)..(24): Cys-PEG
XSQGTFTSDYSKYLDERRAKDFVCWLMNT

SEQ ID NO: 228 - protein, 29 aa, Artificial Sequence
  glucagon analog
  MISC_FEATURE: c-term amidation
  MOD_RES (1)..(1): (Des-amino)His
  MISC_FEATURE (16)..(20): Lactam ring between side chains at positions 16 and 20
  MOD_RES (24)..(24): Cys-PEG
XSQGTFTSDYSKYLDKRRAEDFVCWLMNT

SEQ ID NO: 229 - protein, 29 aa, Artificial Sequence
  glucagon analog
  MISC_FEATURE: c-term amidation
  MOD_RES (1)..(1): (Des-amino)His
  MOD_RES (24)..(24): Cys-PEG
XSQGTFTSDYSKYLDERAAKDFVCWLMNT

SEQ ID NO: 230 - protein, 29 aa, Artificial Sequence
  glucagon analog
  MISC_FEATURE: c-term amidation
  MOD_RES (1)..(1): (Des-amino)His
  MISC_FEATURE (16)..(20): Lactam ring between side chains at positions 16 and 20
  MOD_RES (24)..(24): Cys-PEG
XSQGTFTSDYSKYLDERAAKDFVCWLMNT

SEQ ID NO: 231 - protein, 29 aa, Artificial Sequence
  glucagon analog
  MISC_FEATURE: c-term amidation; lactam ring between side chains at positions 12 and 16
  MOD_RES (1)..(1): (Des-amino)His
  MOD_RES (24)..(24): Cys-PEG
XSQGTFTSDYSKYLDERAAQDFVCWLMNT

SEQ ID NO: 232 - protein, 29 aa, Artificial Sequence
  glucagon analog
  MISC_FEATURE: c-term amidation
  MOD_RES (1)..(1): (Des-amino)His
  MISC_FEATURE (12)..(16): Lactam ring between side chains at positions 12 and 16
  MOD_RES (24)..(24): Cys-PEG
XSQGTFTSDYSKYLDERAAKDFVCWLMNT

SEQ ID NO: 233 - protein, 29 aa, Artificial Sequence
  glucagon analog
  MISC_FEATURE: c-term amidation
  MOD_RES (1)..(1): (Des-amino)His
  MISC_FEATURE (16)..(20): Lactam ring between side chains at positions 16 and 20
  MOD_RES (24)..(24): Cys-PEG
XSQGTFTSDYSKYLDKRAAEDFVCWLMNT

SEQ ID NO: 234 - protein, 29 aa, Artificial Sequence
  glucagon analog
  MISC_FEATURE: c-term amidation
  MOD_RES (1)..(1): (Des-amino)His
  MOD_RES (24)..(24): Cys-PEG
XSQGTFTSDYSKYLDEQAAKEFICWLMNT

SEQ ID NO: 235 - protein, 29 aa, Artificial Sequence
  glucagon analog
  MISC_FEATURE: c-term amidation
  MOD_RES (1)..(1): (Des-amino)His
  MISC_FEATURE (12)..(16): Lactam ring between side chains at positions 12 and 16
  MOD_RES (24)..(24): Cys-PEG
XSQGTFTSDYSKYLDEQAAKEFICWLMNT

SEQ ID NO: 236 - protein, 29 aa, Artificial Sequence
  glucagon analog
  MISC_FEATURE: c-term amidation
  MOD_RES (1)..(1): (Des-amino)His
  MISC_FEATURE (16)..(20): Lactam ring between side chains at positions 16 and 20
  MOD_RES (24)..(24): Cys-PEG
XSQGTFTSDYSKYLDEQAAKEFICWLMNT

SEQ ID NO: 237 - protein, 29 aa, Artificial Sequence
  glucagon analog
  MISC_FEATURE: c-term amidation
  MOD_RES (1)..(1): (Des-amino)His
  MOD_RES (24)..(24): Cys-PEG
XSQGTFTSDYSKYLDEQAAKEFICWLVKG

SEQ ID NO: 238 - protein, 29 aa, Artificial Sequence
  glucagon analog
  MISC_FEATURE: c-term amidation
  MOD_RES (1)..(1): (Des-amino)His
  MISC_FEATURE (12)..(16): Lactam ring between side chains at positions 12 and 16
  MOD_RES (24)..(24): Cys-PEG
XSQGTFTSDYSKYLDEQAAKEFICWLVKG

SEQ ID NO: 239 - protein, 29 aa, Artificial Sequence
  glucagon analog
  MISC_FEATURE: c-term amidation
  MOD_RES (1)..(1): (Des-amino)His
  MISC_FEATURE (16)..(20): Lactam ring between side chains at positions 16 and 20
  MOD_RES (24)..(24): Cys-PEG
XSQGTFTSDYSKYLDEQAAKEFICWLVKG

SEQ ID NO: 240 - protein, 29 aa, Artificial Sequence
  Synthetic peptide
  MISC_FEATURE: c-term amidation
  MOD_RES (2)..(2): Aminoisobutyric acid
  MOD_RES (24)..(24): Cys-PEG
HXQGTFTSDYSKYLDERRAQDFVCWLMNT

SEQ ID NO: 241 - protein, 29 aa, Artificial Sequence
  Synthetic peptide
  MISC_FEATURE: c-term amidation
  MOD_RES (2)..(2): Aminoisobutyric acid
  MOD_RES (24)..(24): Cys-PEG
HXQGTFTSDYSKYLDERRAKDFVCWLMNT

SEQ ID NO: 242 - protein, 29 aa, Artificial Sequence
  Synthetic peptide
  MISC_FEATURE: c-term amidation
  MOD_RES (2)..(2): Aminoisobutyric acid
  MISC_FEATURE (16)..(20): Lactam ring between side chains at positions 16 and 20
  MOD_RES (24)..(24): Cys-PEG
HXQGTFTSDYSKYLDERRAKDFVCWLMNT

SEQ ID NO: 243 - protein, 29 aa, Artificial Sequence
  Synthetic peptide
  MISC_FEATURE: c-term amidation
  MOD_RES (2)..(2): Aminoisobutyric acid
  MISC_FEATURE (12)..(16): Lactam ring between side chains at positions 12 and 16
  MOD_RES (24)..(24): Cys-PEG
HXQGTFTSDYSKYLDERRAQDFVCWLMNT

SEQ ID NO: 244 - protein, 29 aa, Artificial Sequence
  Synthetic peptide
  MISC_FEATURE: c-term amidation
  MOD_RES (2)..(2): Aminoisobutyric acid
  MISC_FEATURE (12)..(16): Lactam ring between side chains at positions 12 and 16
  MOD_RES (24)..(24): Cys-PEG
HXQGTFTSDYSKYLDERRAKDFVCWLMNT

SEQ ID NO: 245 - protein, 29 aa, Artificial Sequence
  Synthetic peptide
  MISC_FEATURE: c-term amidation
  MOD_RES (2)..(2): Aminoisobutyric acid
  MISC_FEATURE (16)..(20): Lactam ring side chains at positions 16 and 20
  MOD_RES (24)..(24): Cys-PEG
HXQGTFTSDYSKYLDKRRAEDFVCWLMNT

SEQ ID NO: 246 - protein, 29 aa, Artificial Sequence
  Synthetic peptide
  MISC_FEATURE: c-term amidation
  MOD_RES (2)..(2): Aminoisobutyric acid
  MOD_RES (24)..(24): Cys-PEG
HXQGTFTSDYSKYLDERAAKDFVCWLMNT

SEQ ID NO: 247 - protein, 29 aa, Artificial Sequence
  Synthetic peptide
  MISC_FEATURE: c-term amidation
  MOD_RES (2)..(2): Aminoisobutyric acid
  MISC_FEATURE (16)..(20): Lactam ring between side chains at positions 16 and 20
  MOD_RES (24)..(24): Cys-PEG
HXQGTFTSDYSKYLDERAAKDFVCWLMNT

SEQ ID NO: 248 - protein, 29 aa, Artificial Sequence
  Synthetic peptide
  MISC_FEATURE: c-term amidation
  MOD_RES (2)..(2): Aminoisobutyric acid
  MISC_FEATURE (12)..(16): Lactam ring between side chains at positions 12 and 16
  MOD_RES (24)..(24): Cys-PEG
HXQGTFTSDYSKYLDERAAQDFVCWLMNT

SEQ ID NO: 249 - protein, 29 aa, Artificial Sequence
  Synthetic peptide
  MISC_FEATURE: c-term amidation
  MOD_RES (2)..(2): Aminoisobutyric acid
  MISC_FEATURE (12)..(16): Lactam ring between side chains at positions 12 and 16
  MOD_RES (24)..(24): Cys-PEG
HXQGTFTSDYSKYLDERAAKDFVCWLMNT

SEQ ID NO: 250 - protein, 29 aa, Artificial Sequence
  Synthetic peptide
  MISC_FEATURE: c-term amidation
  MOD_RES (2)..(2): Aminoisobutyric acid
  MISC_FEATURE (12)..(16): Lactam ring between side chains at positions 12 and 16
  MOD_RES (24)..(24): Cys-PEG
HXQGTFTSDYSKYLDKRAAEDFVCWLMNT

SEQ ID NO: 251 - protein, 29 aa, Artificial Sequence
  Synthetic peptide
  MISC_FEATURE: c-term amidation
  MOD_RES (2)..(2): Aminoisobutyric acid
  MOD_RES (24)..(24): Cys-PEG
HXQGTFTSDYSKYLDEQAAKEFICWLMNT

SEQ ID NO: 252 - protein, 29 aa, Artificial Sequence
  Synthetic peptide
  misc_feature (2)..(2): Xaa can be any naturally occurring amino acid
HXQGTFTSDYSKYLDEQAAKEFICWLMNT

SEQ ID NO: 253 - protein, 29 aa, Artificial Sequence
  Synthetic peptide
  MISC_FEATURE: c-term amidation
  MOD_RES (2)..(2): Aminoisobutyric acid
  MISC_FEATURE (16)..(20): Lactam ring between side chains at positions 16 and 20
  MOD_RES (24)..(24): Cys-PEG
HXQGTFTSDYSKYLDEQAAKEFICWLMNT

SEQ ID NO: 254 - protein, 29 aa, Artificial Sequence
  Synthetic peptide
  MISC_FEATURE: c-term amidation
  MOD_RES (2)..(2): Aminoisobutyric acid
  MOD_RES (24)..(24): Cys-PEG
HXQGTFTSDYSKYLDEQAAKEFICWLVKG

SEQ ID NO: 255 - protein, 29 aa, Artificial Sequence
  Synthetic peptide
  MISC_FEATURE: c-term amidation
  MOD_RES (2)..(2): Aminoisobutyric acid
  MISC_FEATURE (12)..(16): Lactam ring between side chains at positions 12 and 16
  MOD_RES (24)..(24): Cys-PEG
HXQGTFTSDYSKYLDEQAAKEFICWLVKG

SEQ ID NO: 256 - protein, 29 aa, Artificial Sequence
  Synthetic peptide
  MISC_FEATURE: c-term amidation
  MOD_RES (2)..(2): Aminoisobutyric acid
  MISC_FEATURE (16)..(20): Lactam ring between side chains at positions 16 and 20
  MOD_RES (24)..(24): Cys-PEG
HXQGTFTSDYSKYLDEQAAKEFICWLVKG

SEQ ID NO: 257 - protein, 29 aa, Artificial Sequence
  Synthetic peptide
  MISC_FEATURE: c-term amidation
  MOD_RES (2)..(2): D-Ala
  MOD_RES (24)..(24): Cys-PEG
HXQGTFTSDYSKYLDERRAQDFVCWLMNT

SEQ ID NO: 258 - protein, 29 aa, Artificial Sequence
  Synthetic peptide
  MISC_FEATURE: c-term amidation
  MOD_RES (2)..(2): D-Ala
  MOD_RES (24)..(24): Cys-PEG
HXQGTFTSDYSKYLDERRAKDFVCWLMNT

SEQ ID NO: 259 - protein, 29 aa, Artificial Sequence
  Synthetic peptide
  MISC_FEATURE: c-term amidation
  MOD_RES (2)..(2): D-Ala
  MISC_FEATURE (16)..(20): Lactam ring between side chains at positions 16 and 20
  MOD_RES (24)..(24): Cys-PEG
HXQGTFTSDYSKYLDERRAKDFVCWLMNT

SEQ ID NO: 260 - protein, 29 aa, Artificial Sequence
  Synthetic peptide
  MISC_FEATURE: c-term amidation
  MOD_RES (2)..(2): D-Ala
  MISC_FEATURE (12)..(16): Lactam ring between side chrains at positions 12 and 16
  MOD_RES (24)..(24): Cys-PEG
HXQGTFTSDYSKYLDERRAQDFVCWLMNT

SEQ ID NO: 261 - protein, 29 aa, Artificial Sequence
  Synthetic peptide
  MISC_FEATURE: c-term amidation; lactam ring between side chains at positions 12 and 16
  MOD_RES (2)..(2): D-Ala
  MOD_RES (24)..(24): Cys-PEG
HXQGTFTSDYSKYLDERRAKDFVCWLMNT

SEQ ID NO: 262 - protein, 29 aa, Artificial Sequence
  Synthetic peptide
  MISC_FEATURE: c-term amidation
  MOD_RES (2)..(2): D-Ala
  MISC_FEATURE (16)..(20): Lactam ring between side chains at positions 16 and 20
  MOD_RES (24)..(24): Cys-PEG
HXQGTFTSDYSKYLDKRRAEDFVCWLMNT

SEQ ID NO: 263 - protein, 29 aa, Artificial Sequence
  Synthetic peptide
  MISC_FEATURE: c-term amidation
  MOD_RES (2)..(2): D-Ala
  MOD_RES (24)..(24): Cys-PEG
HXQGTFTSDYSKYLDERAAKDFVCWLMNT

SEQ ID NO: 264 - protein, 29 aa, Artificial Sequence
  Synthetic peptide
  MISC_FEATURE: c-term amidation
  MOD_RES (2)..(2): D-Ala
  MISC_FEATURE (16)..(20): Lactam ring between side chains at positions 16 and 20
  MOD_RES (24)..(24): Cys-PEG
HXQGTFTSDYSKYLDERAAKDFVCWLMNT

SEQ ID NO: 265 - protein, 29 aa, Artificial Sequence
  Synthetic peptide
  MISC_FEATURE: c-term amidation
  MOD_RES (2)..(2): D-Ala
  MISC_FEATURE (12)..(16): Lactam ring between side chains at positions 12 and 16
  MOD_RES (24)..(24): Cys-PEG
HXQGTFTSDYSKYLDERAAQDFVCWLMNT

SEQ ID NO: 266 - protein, 29 aa, Artificial Sequence
  Synthetic peptide
  MISC_FEATURE: c-term amidation
  MOD_RES (2)..(2): D-Ala
  MISC_FEATURE (12)..(16): Lactam ring betwee side chains at positions 12 and 16
  MOD_RES (24)..(24): Cys-PEG
HXQGTFTSDYSKYLDERAAKDFVCWLMNT

SEQ ID NO: 267 - protein, 29 aa, Artificial Sequence
  Synthetic peptide
  MISC_FEATURE: c-term amidation
  MOD_RES (2)..(2): D-Ala
  MISC_FEATURE (16)..(20): Lactam ring between side chains at positions 16 and 20
  MOD_RES (24)..(24): Cys-PEG
HXQGTFTSDYSKYLDKRAAEDFVCWLMNT

SEQ ID NO: 268 - protein, 29 aa, Artificial Sequence
  Synthetic peptide
  MISC_FEATURE: c-term amidation
  MOD_RES (2)..(2): D-Ala
  MOD_RES (24)..(24): Cys-PEG
HXQGTFTSDYSKYLDEQAAKEFICWLMNT

SEQ ID NO: 269 - protein, 29 aa, Artificial Sequence
  Synthetic peptide
  MISC_FEATURE: c-term amidation
  MOD_RES (2)..(2): D-Ala
  MISC_FEATURE (12)..(16): Lactam ring betwee side chains at positions 12 and 16
  MOD_RES (24)..(24): Cys-PEG
HXQGTFTSDYSKYLDEQAAKEFICWLMNT

SEQ ID NO: 270 - protein, 29 aa, Artificial Sequence
  Synthetic peptide
  MISC_FEATURE: c-term amidation
  MOD_RES (2)..(2): D-Ala
  MISC_FEATURE (16)..(20): Lactam ring betwee side chains at positions 16 and 20
  MOD_RES (24)..(24): Cys-PEG
HXQGTFTSDYSKYLDEQAAKEFICWLMNT

SEQ ID NO: 271 - protein, 29 aa, Artificial Sequence
  Synthetic peptide
  MISC_FEATURE: c-term amidation
  MOD_RES (2)..(2): D-Ala
  MOD_RES (24)..(24): Cys-PEG
HXQGTFTSDYSKYLDEQAAKEFICWLVKG

SEQ ID NO: 272 - protein, 29 aa, Artificial Sequence
  Synthetic peptide
  MISC_FEATURE: c-term amidation
  MOD_RES (2)..(2): D-Ala
  MISC_FEATURE (12)..(16): Lactam ring between side chains at positions 12 and 16
  MOD_RES (24)..(24): Cys-PEG
HXQGTFTSDYSKYLDEQAAKEFICWLVKG

SEQ ID NO: 273 - protein, 29 aa, Artificial Sequence
  Synthetic peptide
  MISC_FEATURE: c-term amidation
  MOD_RES (2)..(2): D-Ala
  MISC_FEATURE (16)..(20): Lactam ring between side chains at positions 16 and 20
  MOD_RES (24)..(24): Cys-PEG
HXQGTFTSDYSKYLDEQAAKEFICWLVKG

SEQ ID NO: 274 - protein, 29 aa, Artificial Sequence
  Synthetic peptide
  MISC_FEATURE: c-term amidation
  MOD_RES (24)..(24): Cys-PEG
HSEGTFTSDYSKYLDERRAQDFVCWLMNT

SEQ ID NO: 275 - protein, 29 aa, Artificial Sequence
  Synthetic peptide
  MISC_FEATURE: c-term amidation
  MOD_RES (24)..(24): Cys-PEG
HSEGTFTSDYSKYLDERRAKDFVCWLMNT

SEQ ID NO: 276 - protein, 29 aa, Artificial Sequence
  Synthetic peptide
  MISC_FEATURE: c-term amidation
  MISC_FEATURE (16)..(20): Lactam ring between side chains at positions 16 and 20
  MOD_RES (24)..(24): Cys-PEG
HSEGTFTSDYSKYLDERRAKDFVCWLMNT

SEQ ID NO: 277 - protein, 29 aa, Artificial Sequence
  Synthetic peptide
  MISC_FEATURE: c-term amidation
  MISC_FEATURE (12)..(16): Lactam ring between side chains at positions 12 and 16
  MOD_RES (24)..(24): Cys-PEG
HSEGTFTSDYSKYLDERRAQDFVCWLMNT

SEQ ID NO: 278 - protein, 29 aa, Artificial Sequence
  Synthetic peptide
  MISC_FEATURE: c-term amidation
  MISC_FEATURE (12)..(16): Lactam ring between side chains at positions 12 and 16
  MOD_RES (24)..(24): Cys-PEG
HSEGTFTSDYSKYLDERRAKDFVCWLMNT

SEQ ID NO: 279 - protein, 29 aa, Artificial Sequence
  Synthetic peptide
  MISC_FEATURE: c-term amidation
  MISC_FEATURE (16)..(20): Lactam ring between side chains at positions 16 and 20
  MOD_RES (24)..(24): Cys-PEG
HSEGTFTSDYSKYLDKRRAEDFVCWLMNT

SEQ ID NO: 280 - protein, 29 aa, Artificial Sequence
  Synthetic peptide
  MISC_FEATURE: c-term amidation
  MOD_RES (24)..(24): Cys-PEG
HSEGTFTSDYSKYLDERAAKDFVCWLMNT

SEQ ID NO: 281 - protein, 29 aa, Artificial Sequence
  Synthetic peptide
  MISC_FEATURE: c-term amidation
  MISC_FEATURE (16)..(20): Lactam ring between side chains at positions 16 and 20
  MOD_RES (24)..(24): Cys-PEG
HSEGTFTSDYSKYLDERAAKDFVCWLMNT

SEQ ID NO: 282 - protein, 29 aa, Artificial Sequence
  Synthetic peptide
  MISC_FEATURE: c-term amidation
  MISC_FEATURE (12)..(16): Lactam ring between side chains at positions 12 and 16
  MOD_RES (24)..(24): Cys-PEG
HSEGTFTSDYSKYLDERAAQDFVCWLMNT

SEQ ID NO: 283 - protein, 29 aa, Artificial Sequence
  Synthetic peptide
  MISC_FEATURE: c-term amidation
  MISC_FEATURE (12)..(16): Lactam ring between side chains at positions 12 and 16
  MOD_RES (24)..(24): Cys-PEG
HSEGTFTSDYSKYLDERAAKDFVCWLMNT

SEQ ID NO: 284 - protein, 29 aa, Artificial Sequence
  Synthetic peptide
  MISC_FEATURE: c-term amidation
  MISC_FEATURE (16)..(20): Lactam ring between side chains at positions 16 and 20
  MOD_RES (24)..(24): Cys-PEG
HSEGTFTSDYSKYLDKRAAEDFVCWLMNT

SEQ ID NO: 285 - protein, 29 aa, Artificial Sequence
  Synthetic peptide
  MISC_FEATURE: c-term amidation
  MOD_RES (24)..(24): Cys-PEG
HSEGTFTSDYSKYLDEQAAKEFICWLMNT

SEQ ID NO: 286 - protein, 29 aa, Artificial Sequence
  Synthetic peptide
  MISC_FEATURE: c-term amidation
  MISC_FEATURE (12)..(16): Lactam ring between side chains at positions 12 and 16
  MOD_RES (24)..(24): Cys-PEG
HSEGTFTSDYSKYLDEQAAKEFICWLMNT

SEQ ID NO: 287 - protein, 29 aa, Artificial Sequence
  Synthetic peptide
  MISC_FEATURE: c-term amidation
  MISC_FEATURE (16)..(20): Lactam ring between side chain at positions 16 and 20
  MOD_RES (24)..(24): Cys-PEG
HSEGTFTSDYSKYLDEQAAKEFICWLMNT

SEQ ID NO: 288 - protein, 29 aa, Artificial Sequence
  Synthetic peptide
  MISC_FEATURE: c-term amidation
  MOD_RES (24)..(24): Cys-PEG
HSEGTFTSDYSKYLDEQAAKEFICWLVKG

SEQ ID NO: 289 - protein, 29 aa, Artificial Sequence
  Synthetic peptide
  MISC_FEATURE: c-term amidation
  MISC_FEATURE (12)..(16): Lactam ring between side chains at positions 12 and 16
  MOD_RES (24)..(24): Cys-PEG
HSEGTFTSDYSKYLDEQAAKEFICWLVKG

SEQ ID NO: 290 - protein, 29 aa, Artificial Sequence
  Synthetic peptide
  MISC_FEATURE: c-term amidation
  MISC_FEATURE (16)..(20): Lactam ring between side chains at positions 16 and 20
  MOD_RES (24)..(24): Cys-PEG
HSEGTFTSDYSKYLDEQAAKEFICWLVKG

SEQ ID NO: 291 - protein, 29 aa, Artificial Sequence
  Synthetic peptide
  MISC_FEATURE: c-term amidation
  MOD_RES (1)..(1): (Des-amino)His
  MOD_RES (24)..(24): Cys-PEG
XSEGTFTSDYSKYLDERRAQDFVCWLMNT

SEQ ID NO: 292 - protein, 29 aa, Artificial Sequence
  Synthetic peptide
  MISC_FEATURE: c-term amidation
  MOD_RES (1)..(1): (Des-amino)His
  MOD_RES (24)..(24): Cys-PEG
XSEGTFTSDYSKYLDERRAKDFVCWLMNT

SEQ ID NO: 293 - protein, 29 aa, Artificial Sequence
  Synthetic peptide
  MISC_FEATURE: c-term amidation
  MOD_RES (1)..(1): (Des-amino)His
  MISC_FEATURE (16)..(20): Lactam ring between side chains at positions 16 and 20
  MOD_RES (24)..(24): Cys-PEG
XSEGTFTSDYSKYLDERRAKDFVCWLMNT

SEQ ID NO: 294 - protein, 29 aa, Artificial Sequence
  Synthetic peptide
  MISC_FEATURE: c-term amidation
  MOD_RES (1)..(1): (Des-amino)His
  MISC_FEATURE (12)..(16): Lactam ring between side chains at positions 12 and 16
  MOD_RES (24)..(24): Cys-PEG
XSEGTFTSDYSKYLDERRAQDFVCWLMNT

SEQ ID NO: 295 - protein, 29 aa, Artificial Sequence
  Synthetic peptide
  MISC_FEATURE: c-term amidation
  MOD_RES (1)..(1): (Des-amino)His
  MISC_FEATURE (12)..(16): Lactam ring between side chains at positions 12 and 16
  MOD_RES (24)..(24): Cys-PEG
XSEGTFTSDYSKYLDERRAKDFVCWLMNT

SEQ ID NO: 296 - protein, 29 aa, Artificial Sequence
  Synthetic peptide
  MISC_FEATURE: c-term amidation
  MOD_RES (1)..(1): (Des-amino)His
  MISC_FEATURE (16)..(20): Lactam ring between side chains at positions 16 and 20
  MOD_RES (24)..(24): Cys-PEG
XSEGTFTSDYSKYLDKRRAEDFVCWLMNT

SEQ ID NO: 297 - protein, 29 aa, Artificial Sequence
  Synthetic peptide
  MISC_FEATURE: c-term amidation
  MOD_RES (1)..(1): (Des-amino)His
  MOD_RES (24)..(24): Cys-PEG
XSEGTFTSDYSKYLDERAAKDFVCWLMNT

SEQ ID NO: 298 - protein, 29 aa, Artificial Sequence
  Synthetic peptide
  MISC_FEATURE: c-term amidation
  MOD_RES (1)..(1): (Des-amino)His
  MISC_FEATURE (16)..(20): Lactam ring between side chains at positions 16 and 20
  MOD_RES (24)..(24): Cys-PEG
XSEGTFTSDYSKYLDERAAKDFVCWLMNT

SEQ ID NO: 299 - protein, 29 aa, Artificial Sequence
  Synthetic peptide
  MISC_FEATURE: c-term amidation
  MOD_RES (1)..(1): (Des-amino)His
  MISC_FEATURE (12)..(16): Lactam ring between side chains at positions 12 and 16
  MOD_RES (24)..(24): Cys-PEG
XSEGTFTSDYSKYLDERAAQDFVCWLMNT

SEQ ID NO: 300 - protein, 29 aa, Artificial Sequence
  Synthetic peptide
  MISC_FEATURE: c-term amidation
  MOD_RES (1)..(1): (Des-amino)His
  MISC_FEATURE (12)..(16): Lactam ring between side chains at positions 12 and 16
  MOD_RES (24)..(24): Cys-PEG
XSEGTFTSDYSKYLDERAAKDFVCWLMNT

SEQ ID NO: 301 - protein, 29 aa, Artificial Sequence
  Synthetic peptide
  MISC_FEATURE: c-term amidation
  MOD_RES (1)..(1): (Des-amino)His
  MISC_FEATURE (16)..(20): Lactam ring between side chains at positions 16 and 20
  MOD_RES (24)..(24): Cys-PEG
XSEGTFTSDYSKYLDKRAAEDFVCWLMNT

SEQ ID NO: 302 - protein, 29 aa, Artificial Sequencce
  Synthetic peptide
  MISC_FEATURE: c-term amidation
  MOD_RES (1)..(1): (Des-amino)His
  MOD_RES (24)..(24): Cys-PEG
XSEGTFTSDYSKYLDEQAAKGFICWLMNT

SEQ ID NO: 303 - protein, 29 aa, Artificial Sequence
  Synthetic peptide
  MISC_FEATURE: c-term amidation
  MOD_RES (1)..(1): (Des-amino)His
  MISC_FEATURE (12)..(16): Lactam ring between side chains at positions 12 and 16
  MOD_RES (24)..(24): Cys-PEG
XSEGTFTSDYSKYLDEQAAKGFICWLMNT

SEQ ID NO: 304 - protein, 29 aa, Artificial Sequence
  Synthetic peptide
  MISC_FEATURE: c-term amidation
  MOD_RES (1)..(1): (Des-amino)His
  MISC_FEATURE (16)..(20): Lactam ring between side chains at positions 16 and 20
  MOD_RES (24)..(24): Cys-PEG
XSEGTFTSDYSKYLDEQAAKGFICWLMNT

SEQ ID NO: 305 - protein, 29 aa, Artificial Sequencce
  Synthetic peptide
  MISC_FEATURE: c-term amidation
  MOD_RES (1)..(1): (des-amino)His
  MOD_RES (24)..(24): Cys-PEG
XSEGTFTSDYSKYLDEQAAKGFICWLVKG

SEQ ID NO: 306 - protein, 29 aa, Artificial Sequence
  Synthetic peptide
  MISC_FEATURE: c-term amidation
  MOD_RES (1)..(1): (Des-amino)His
  MISC_FEATURE (12)..(16): Lactam ring between side chains at positions 12 and 16
  MOD_RES (24)..(24): Cys-PEG
XSEGTFTSDYSKYLDEQAAKGFICWLVKG

SEQ ID NO: 307 - protein, 29 aa, Artificial Sequence
  Synthetic peptide
  MISC_FEATURE: c-term amidation
  MOD_RES (1)..(1): (Des-amino)His
  MISC_FEATURE (16)..(20): Lactam ring between side chains at positions 16 and 20
  MOD_RES (24)..(24): Cys-PEG
XSEGTFTSDYSKYLDEQAAKGFICWLVKG

SEQ ID NO: 308 - protein, 29 aa, Artificial Sequence
  Synthetic peptide
  MISC_FEATURE: c-term amidation
  MOD_RES (2)..(2): Aminoisobutyric acid
  MOD_RES (24)..(24): Cys-PEG
HXEGTFTSDYSKYLDERRAQDFVCWLMNT

SEQ ID NO: 309 - protein, 29 aa, Artificial Sequence
  Synthetic peptide
  MISC_FEATURE: c-term amidation
  MOD_RES (2)..(2): Aminoisobutyric acid
  MOD_RES (24)..(24): Cys-PEG
HXEGTFTSDYSKYLDERRAKDFVCWLMNT

SEQ ID NO: 310 - protein, 29 aa, Artificial Sequence
  Synthetic peptide
  MISC_FEATURE: c-term amidation
  MOD_RES (2)..(2): Aminoisobutyric acid
  MISC_FEATURE (16)..(20): Lactam ring between side chains at positions 16 and 20
  MOD_RES (24)..(24): Cys-PEG
HXEGTFTSDYSKYLDERRAKDFVCWLMNT

SEQ ID NO: 311 - protein, 29 aa, Artificial Sequence
  Synthetic peptide
  MISC_FEATURE: c-term amidation
  MOD_RES (2)..(2): Aminoisobutyric acid
  MISC_FEATURE (12)..(16): Lactam ring between side chain at positions 12 and 16
  MOD_RES (24)..(24): Cys-PEG
HXEGTFTSDYSKYLDERRAQDFVCWLMNT

SEQ ID NO: 312 - protein, 29 aa, Artificial Sequence
  Synthetic peptide
  MISC_FEATURE: c-term amidation
  MOD_RES (2)..(2): Aminoisobutyric acid
  MISC_FEATURE (12)..(16): Lactam ring between side chains at positions 12 and 16
  MOD_RES (24)..(24): Cys-PEG
HXEGTFTSDYSKYLDERRAKDFVCWLMNT

SEQ ID NO: 313 - protein, 29 aa, Artificial Sequence
  Synthetic peptide
  MISC_FEATURE: c-term amidation
  MOD_RES (2)..(2): Aminoisobutyric acid
  MISC_FEATURE (16)..(20): Lactam ring between side chains at positions 16 and 20
  MOD_RES (24)..(24): Cys-PEG
HXEGTFTSDYSKYLDKRRAEDFVCWLMNT

SEQ ID NO: 314 - protein, 29 aa, Artificial Sequence
  Synthetic peptide
  MISC_FEATURE: c-term amidation
  MOD_RES (2)..(2): Aminoisobutyric acid
  MOD_RES (24)..(24): Cys-PEG
HXEGTFTSDYSKYLDERAAKDFVCWLMNT

SEQ ID NO: 315 - protein, 29 aa, Artificial Sequence
  Synthetic peptide
  MISC_FEATURE: c-term amidation
  MOD_RES (2)..(2): Aminoisobutyric acid
  MISC_FEATURE (16)..(20): Lactam ring between seide chains at positions 16 and 20
  MOD_RES (24)..(24): Cys-PEG
HXEGTFTSDYSKYLDERAAKDFVCWLMNT

SEQ ID NO: 316 - protein, 29 aa, Artificial Sequence
  Synthetic peptide
  MISC_FEATURE: c-term amidation
  MOD_RES (2)..(2): Aminoisobutyric acid
  MISC_FEATURE (12)..(16): Lactam ring between side chains at positions 12 and 16
  MOD_RES (24)..(24): Cys-PEG
HXEGTFTSDYSKYLDERAAQDFVCWLMNT

SEQ ID NO: 317 - protein, 29 aa, Artificial Sequence
  Synthetic peptide
  MISC_FEATURE: c-term amidation
  MOD_RES (2)..(2): Aminoisobutyric acid
  MISC_FEATURE (12)..(16): Lactam ring between side chains at positions 12 adn 16
  MOD_RES (24)..(24): Cys-PEG
HXEGTFTSDYSKYLDERAAKDFVCWLMNT

SEQ ID NO: 318 - protein, 29 aa, Artificial Sequence
  Synthetic peptide
  MISC_FEATURE: c-term amidation
  MOD_RES (2)..(2): Aminoisobutyric acid
  MISC_FEATURE (16)..(20): Lactam ring between side chains at positions 16 and 20
  MOD_RES (24)..(24): Cys-PEG
HXEGTFTSDYSKYLDKRAAEDFVCWLMNT

SEQ ID NO: 319 - protein, 29 aa, Artificial Sequence
  Synthetic peptide
  MISC_FEATURE: c-term amidation
  MOD_RES (2)..(2): Aminoisobutyric acid
  MOD_RES (24)..(24): Cys-PEG
HXEGTFTSDYSKYLDEQAAKEFICWLMNT

SEQ ID NO: 320 - protein, 29 aa, Artificial Sequence
  Synthetic peptide
  MISC_FEATURE: c-term amidation
  MOD_RES (2)..(2): Aminoisobutyric acid
  MISC_FEATURE (12)..(16): Lactam ring between side chains at positions 12 and 16
  MOD_RES (24)..(24): Cys-PEG
HXEGTFTSDYSKYLDEQAAKEFICWLMNT

SEQ ID NO: 321 - protein, 29 aa, Artificial Sequence
  Synthetic peptide
  MISC_FEATURE: c-term amidation
  MOD_RES (2)..(2): Aminoisobutyric acid
  MISC_FEATURE (16)..(20): Lactam ring between side chains at position 16 and 20
  MOD_RES (24)..(24): Cys-PEG
HXEGTFTSDYSKYLDEQAAKEFICWLMNT

SEQ ID NO: 322 - protein, 29 aa, Artificial Sequence
  Synthetic peptide
  MISC_FEATURE: c-term amidation
  MOD_RES (2)..(2): Aminoisobutyric acid
  MOD_RES (24)..(24): Cys-PEG
HXEGTFTSDYSKYLDEQAAKEFICWLVKG

SEQ ID NO: 323 - protein, 29 aa, Artificial Sequence
  Synthetic peptide
  MISC_FEATURE: c-term amidation
  MOD_RES (2)..(2): Aminoisobutyric acid
  MISC_FEATURE (12)..(16): Lactam ring between side chains at positions 12 and 16
  MOD_RES (24)..(24): Cys-PEG
HXEGTFTSDYSKYLDEQAAKEFICWLVKG

SEQ ID NO: 324 - protein, 29 aa, Artificial Sequence
  Synthetic peptide
  MISC_FEATURE: c-term amidation
  MOD_RES (2)..(2): Aminoisobutyric acid
  MISC_FEATURE (16)..(20): Lactam ring between side chains at position 16 and 20
  MOD_RES (24)..(24): Cys-PEG
HXEGTFTSDYSKYLDEQAAKEFICWLVKG

SEQ ID NO: 325 - protein, 29 aa, Artificial Sequence
  Synthetic peptide
  MISC_FEATURE: c-term amidation
  MOD_RES (2)..(2): D-Ala
  MOD_RES (24)..(24): Cys-PEG
HXEGTFTSDYSKYLDERRAQDFVCWLMNT

SEQ ID NO: 326 - protein, 29 aa, Artificial Sequence
  Synthetic peptide
  MISC_FEATURE: c-term amidation
  MOD_RES (2)..(2): D-Ala
  MOD_RES (24)..(24): Cys-PEG
HXEGTFTSDYSKYLDERRAKDFVCWLMNT

SEQ ID NO: 327 - protein, 29 aa, Artificial Sequence
  Synthetic peptide
  MISC_FEATURE: c-term amidation
  MOD_RES (2)..(2): D-Ala
  MISC_FEATURE (16)..(20): Lactam ring between side chains at positions 16 and 20
  MOD_RES (24)..(24): Cys-PEG
HXEGTFTSDYSKYLDERRAKDFVCWLMNT

SEQ ID NO: 328 - protein, 29 aa, Artificial Sequence
  Synthetic peptide
  MISC_FEATURE: c-term amidation
  MOD_RES (2)..(2): D-Ala
  MISC_FEATURE (12)..(16): Lactam between side chains at positions 12 and 16
  MOD_RES (24)..(24): Cys-PEG
HXEGTFTSDYSKYLDERRAQDFVCWLMNT

SEQ ID NO: 329 - protein, 29 aa, Artificial Sequence
  Synthetic peptide
  MISC_FEATURE: c-term amidation
  MOD_RES (2)..(2): D-Ala
  MISC_FEATURE (12)..(16): Lactam ring between side chains at positions 12 and 16
  MOD_RES (24)..(24): Cys-PEG
HXEGTFTSDYSKYLDERRAKDFVCWLMNT

SEQ ID NO: 330 - protein, 29 aa, Artificial Sequence
  Synthetic peptide
  MISC_FEATURE: c-term amidation
  MOD_RES (2)..(2): D-Ala
  MISC_FEATURE (16)..(20): Lactam ring between side chains at positions 16 and 20
  MOD_RES (24)..(24): Cys-PEG
HXEGTFTSDYSKYLDKRRAEDFVCWLMNT

SEQ ID NO: 331 - protein, 29 aa, Artificial Sequence
  Synthetic peptide
  MISC_FEATURE: c-term amidation
  MOD_RES (2)..(2): D-Ala
  MOD_RES (24)..(24): Cys-PEG
HXEGTFTSDYSKYLDERAAKDFVCWLMNT

SEQ ID NO: 332 - protein, 29 aa, Artificial Sequence
  Synthetic peptide
  MISC_FEATURE: c-term amidation
  MOD_RES (2)..(2): D-Ala
  MISC_FEATURE (16)..(20): Lactam ring between side chains at positions 16 and 20
  MOD_RES (24)..(24): Cys-PEG
HXEGTFTSDYSKYLDERAAKDFVCWLMNT

SEQ ID NO: 333 - protein, 29 aa, Artificial Sequence
  Synthetic peptide
  MISC_FEATURE: c-term amidation
  MOD_RES (2)..(2): D-Ala
  MISC_FEATURE (12)..(16): Lactam ring between side chains at positions 12 and 16
  MOD_RES (24)..(24): Cys-PEG
HXEGTFTSDYSKYLDERAAQDFVCWLMNT

SEQ ID NO: 334 - protein, 29 aa, Artificial Sequence
  Synthetic peptide
  MISC_FEATURE: c-term amidation
  MOD_RES (2)..(2): D-Ala
  MISC_FEATURE (12)..(16): Lactam ring between side chains at positions 12 and 16
  MOD_RES (24)..(24): Cys-PEG
HXEGTFTSDYSKYLDERAAKDFVCWLMNT

SEQ ID NO: 335 - protein, 29 aa, Artificial Sequence
  Synthetic peptide
  MISC_FEATURE: c-term amidation
  MOD_RES (2)..(2): D-Ala
  MISC_FEATURE (12)..(16): Lactam ring between side chainst at positions 16 and 20
  MOD_RES (24)..(24): Cys-PEG
HXEGTFTSDYSKYLDKRAAEDFVCWLMNT

SEQ ID NO: 336 - protein, 29 aa, Artificial Sequence
  Synthetic peptide
  MISC_FEATURE: c-term amidation
  MOD_RES (2)..(2): D-Ala
  MOD_RES (24)..(24): Cys-PEG
HXEGTFTSDYSKYLDEQAAKEFICWLMNT

SEQ ID NO: 337 - protein, 29 aa, Artificial Sequence
  Synthetic peptide
  MISC_FEATURE: c-term amidation
  MOD_RES (2)..(2): D-Ala
  MISC_FEATURE (12)..(16): Lactam ring between side chains at positions 12 and 16
  MOD_RES (24)..(24): Cys-PEG
HXEGTFTSDYSKYLDEQAAKEFICWLMNT

SEQ ID NO: 338 - protein, 29 aa, Artificial Sequence
  Synthetic peptide
  MISC_FEATURE: c-term amidation
  MOD_RES (2)..(2): D-Ala
  MISC_FEATURE (16)..(20): Lactam right between side chains at positions 16 and 20
  MOD_RES (24)..(24): Cys-PEG
HXEGTFTSDYSKYLDEQAAKEFICWLMNT

SEQ ID NO: 339 - protein, 29 aa, Artificial Sequence
  Synthetic peptide
  MISC_FEATURE: c-term amidation
  MOD_RES (2)..(2): D-Ala
  MOD_RES (24)..(24): Cys-PEG
HXEGTFTSDYSKYLDEQAAKEFICWLVKG

SEQ ID NO: 340 - protein, 29 aa, Artificial Sequence
  Synthetic peptide
  MISC_FEATURE: c-term amidation
  MOD_RES (2)..(2): D-Ala
  MISC_FEATURE (12)..(16): Lactam ring between side chains at positions 12 and 16
  MOD_RES (24)..(24): Cys-PEG
HXEGTFTSDYSKYLDEQAAKEFICWLVKG

SEQ ID NO: 341 - protein, 29 aa, Artificial Sequence
  Synthetic peptide
  MISC_FEATURE: c-term amidation
  MOD_RES (2)..(2): D-Ala
  MISC_FEATURE (16)..(20): Lactam ring between side chains at positions 16 and 20
  MOD_RES (24)..(24): Cys-PEG
HXEGTFTSDYSKYLDEQAAKEFICWLVKG

SEQ ID NO: 342 - protein, 29 aa, Artificial Sequence
  Synthetic peptide
  MISC_FEATURE: c-term amidation
  MOD_RES (16)..(16): Cys-PEG
HSQGTFTSDYSKYLDCRRAKDFVQWLMNT

SEQ ID NO: 343 - protein, 29 aa, Artificial Sequence
  Synthetic peptide
  MISC_FEATURE: c-term amidation
  MOD_RES (16)..(16): Cys-PEG
HSQGTFTSDYSKYLDCRAAKDFVQWLMNT

SEQ ID NO: 344 - protein, 29 aa, Artificial Sequence
  Synthetic peptide
  MISC_FEATURE: c-term amidation
  MOD_RES (16)..(16): Cys-PEG
HSQGTFTSDYSKYLDCQAAKEFIAWLMNT

SEQ ID NO: 345 - protein, 29 aa, Artificial Sequence
  Synthetic peptide
  MISC_FEATURE: c-term amidation
  MOD_RES (16)..(16): Cys-PEG
HSQGTFTSDYSKYLDCQAAKEFIAWLVKG

SEQ ID NO: 346 - protein, 29 aa, Artificial Sequence
  Synthetic peptide
  MISC_FEATURE: c-term amidation
  MOD_RES (1)..(1): (Des-amino)His
  MOD_RES (16)..(16): Cys-PEG
XSQGTFTSDYSKYLDCRRAKDFVQWLMNT

SEQ ID NO: 347 - protein, 29 aa, Artificial Sequence
  Synthetic peptide
  MISC_FEATURE: c-term amidation
  MOD_RES (1)..(1): (Des-amino)His
  MOD_RES (16)..(16): Cys-PEG
XSQGTFTSDYSKYLDCRAAKDFVQWLMNT

SEQ ID NO: 348 - protein, 29 aa, Artificial Sequence
  Synthetic peptide
  MISC_FEATURE: c-term amidation
  MOD_RES (1)..(1): (Des-amino)His
  MOD_RES (16)..(16): Cys-PEG
XSQGTFTSDYSKYLDCQAAKEFIAWLMNT

SEQ ID NO: 349 - protein, 29 aa, Artificial Sequence
  Synthetic peptide
  MISC_FEATURE: c-term amidation
  MOD_RES (1)..(1): (Des-amino)His
  MOD_RES (16)..(16): Cys-PEG
XSQGTFTSDYSKYLDCQAAKEFIAWLVKG

SEQ ID NO: 350 - protein, 29 aa, Artificial Sequence
  Synthetic peptide
  MISC_FEATURE: c-term amidation
  MOD_RES (1)..(1): (Des-amino)His
  MOD_RES (16)..(16): Cys-PEG
XSQGTFTSDYSKYLDCQAAKEFIAWLMNT

SEQ ID NO: 351 - protein, 29 aa, Artificial Sequence
  Synthetic peptide
  MISC_FEATURE: c-term amidation
  MOD_RES (2)..(2): Aminoisobutyric acid
  MOD_RES (16)..(16): Cys-PEG
HXQGTFTSDYSKYLDCRAAKDFVQWLMNT

SEQ ID NO: 352 - protein, 29 aa, Artificial Sequence
  Synthetic peptide
  MISC_FEATURE: c-term amidation
  MOD_RES (2)..(2): Aminoisobutyric acid
  MOD_RES (16)..(16): Cys-PEG
HXQGTFTSDYSKYLDCQAAKEFIAWLMNT

SEQ ID NO: 353 - protein, 29 aa, Artificial Sequence
  Synthetic peptide
  MISC_FEATURE: c-term amidation
  MOD_RES (2)..(2): Aminoisobutyric acid
  MOD_RES (16)..(16): Cys-PEG
HXQGTFTSDYSKYLDCQAAKEFIAWLVKG

SEQ ID NO: 354 - protein, 29 aa, Artificial Sequence
  Synthetic peptide
  MISC_FEATURE: c-term amidation
  MOD_RES (2)..(2): D-Ala
  MOD_RES (16)..(16): Cys-PEG
HXQGTFTSDYSKYLDCRRAKDFVQWLMNT

SEQ ID NO: 355 - protein, 29 aa, Artificial Sequence
  Synthetic peptide
  MISC_FEATURE: c-term amidation
  MOD_RES (2)..(2): D-Ala
  MOD_RES (16)..(16): Cys-PEG
HXQGTFTSDYSKYLDCRAAKDFVQWLMNT

SEQ ID NO: 356 - protein, 29 aa, Artificial Sequence
  Synthetic peptide
  MISC_FEATURE: c-term amidation
  MOD_RES (2)..(2): D-Ala
  MOD_RES (16)..(16): Cys-PEG
HXQGTFTSDYSKYLDCQAAKEFIAWLMNT

SEQ ID NO: 357 - protein, 29 aa, Artificial Sequence
  Synthetic peptide
  MISC_FEATURE: c-term amidation
  MOD_RES (2)..(2): D-Ala
  MOD_RES (16)..(16): Cys-PEG
HXQGTFTSDYSKYLDCQAAKEFIAWLVKG

SEQ ID NO: 358 - protein, 29 aa, Artificial Sequence
  Synthetic peptide
  MISC_FEATURE: c-term amidation
  MOD_RES (16)..(16): Cys-PEG
HSEGTFTSDYSKYLDCRRAKDFVQWLMNT

SEQ ID NO: 359 - protein, 29 aa, Artificial Sequence
  Synthetic peptide
  MISC_FEATURE: c-term amidation
  MOD_RES (16)..(16): Cys-PEG
HSEGTFTSDYSKYLDCRAAKDFVQWLMNT

SEQ ID NO: 360 - protein, 29 aa, Artificial Sequence
  Synthetic peptide
  MISC_FEATURE: c-term amidation
  MOD_RES (16)..(16): Cys-PEG
HSEGTFTSDYSKYLDCQAAKEFIAWLMNT

SEQ ID NO: 361 - protein, 29 aa, Artificial Sequence
  Synthetic peptide
  MISC_FEATURE: c-term amidation
  MOD_RES (16)..(16): Cys-PEG
HSEGTFTSDYSKYLDCQAAKEFIAWLVKG

SEQ ID NO: 362 - protein, 29 aa, Artificial Sequence
  Synthetic peptide
  MISC_FEATURE: c-term amidation
  MOD_RES (1)..(1): (Des-amino)His
  MOD_RES (16)..(16): Cys-PEG
XSEGTFTSDYSKYLDCRRAKDFVQWLMNT

SEQ ID NO: 363 - protein, 29 aa, Artificial Sequence
  Synthetic peptide
  MISC_FEATURE: c-term amidation
  MOD_RES (1)..(1): (Des-amino)His
  MOD_RES (16)..(16): Cys-PEG
XSEGTFTSDYSKYLDCRAAKDFVQWLMNT

SEQ ID NO: 364 - protein, 29 aa, Artificial Sequence
  Synthetic peptide
  MISC_FEATURE: c-term amidation
  MOD_RES (1)..(1): (Des-amino)His
  MOD_RES (16)..(16): Cys-PEG
XSEGTFTSDYSKYLDCQAAKEFIAWLMNT

SEQ ID NO: 365 - protein, 29 aa, Artificial Sequence
  Synthetic peptide
  MISC_FEATURE: c-term amidation
  MOD_RES (1)..(1): (Des-amino)His
  MOD_RES (16)..(16): Cys-PEG
XSEGTFTSDYSKYLDCQAAKEFIAWLVKG

SEQ ID NO: 366 - protein, 29 aa, Artificial Sequence
  Synthetic peptide
  MISC_FEATURE: c-term amidation
  MOD_RES (2)..(2): D-Ala
  MOD_RES (16)..(16): Cys-PEG
HXEGTFTSDYSKYLDCRRAKDFVQWLMNT

SEQ ID NO: 367 - protein, 29 aa, Artificial Sequence
  Synthetic peptide
  MISC_FEATURE: c-term amidation
  MOD_RES (2)..(2): D-Ala
  MOD_RES (16)..(16): Cys-PEG
HXEGTFTSDYSKYLDCRAAKDFVQWLMNT

SEQ ID NO: 368 - protein, 29 aa, Artificial Sequence
  Synthetic peptide
  MISC_FEATURE: c-term amidation
  MOD_RES (2)..(2): D-Ala
  MOD_RES (16)..(16): Cys-PEG
HXEGTFTSDYSKYLDCQAAKEFIAWLMNT

SEQ ID NO: 369 - protein, 29 aa, Artificial Sequence
  Synthetic peptide
  MISC_FEATURE: c-term amidation
  MOD_RES (2)..(2): D-Ala
  MOD_RES (16)..(16): Cys-PEG
HXEGTFTSDYSKYLDCQAAKEFIAWLVKG

SEQ ID NO: 370 - protein, 29 aa, Artificial Sequence
  Synthetic peptide
  MISC_FEATURE: c-term amidation
  MOD_RES (2)..(2): D-Ala
  MOD_RES (16)..(16): Cys-PEG
HXEGTFTSDYSKYLDCRRAKDFVQWLMNT

SEQ ID NO: 371 - protein, 29 aa, Artificial Sequence
  Synthetic peptide
  MISC_FEATURE: c-term amidation
  MOD_RES (2)..(2): D-Ala
  MOD_RES (16)..(16): Cys-PEG
HXEGTFTSDYSKYLDCRAAKDFVQWLMNT

SEQ ID NO: 372 - protein, 29 aa, Artificial Sequence
  Synthetic peptide
  MISC_FEATURE: c-term amidation
  MOD_RES (2)..(2): D-Ala
  MOD_RES (16)..(16): Cys-PEG
HXEGTFTSDYSKYLDCQAAKEFIAWLMNT

SEQ ID NO: 373 - protein, 29 aa, Artificial Sequence
  Synthetic peptide
  MISC_FEATURE: c-term amidation
  MOD_RES (2)..(2): D-Ala
  MOD_RES (16)..(16): Cys-PEG
HXEGTFTSDYSKYLDCQAAKEFIAWLVKG

SEQ ID NO: 374 - protein, 29 aa, Artificial Sequence
  Synthetic peptide
  MISC_FEATURE: c-term amidation
HSQGTFTSDYSKYLDERRAQDFVQWLMDT

SEQ ID NO: 375 - protein, 29 aa, Artificial Sequence
  Synthetic peptide
  MISC_FEATURE: c-term amidation
HSQGTFTSDYSKYLDERRAKDFVQWLMDT

SEQ ID NO: 376 - protein, 29 aa, Artificial Sequence
  Synthetic peptide
  MISC_FEATURE: c-term amidation
  MISC_FEATURE (16)..(20): Lactam ring between side chains at positions 16 and 20
HSQGTFTSDYSKYLDERRAKDFVQWLMDT

SEQ ID NO: 377 - protein, 29 aa, Artificial Sequence
  Synthetic peptide
  MISC_FEATURE: c-term amidation
  MISC_FEATURE (12)..(16): Lactam ring between side chains at positions 12 and 16
HSQGTFTSDYSKYLDERRAQDFVQWLMDT

SEQ ID NO: 378 - protein, 29 aa, Artificial Sequence
  Synthetic peptide
  MISC_FEATURE: c-term amidation
  MISC_FEATURE (12)..(16): Lactam ring between side chains at positions 12 and 16
HSQGTFTSDYSKYLDERRAKDFVQWLMDT

SEQ ID NO: 379 - protein, 29 aa, Artificial Sequence
  Synthetic peptide
  MISC_FEATURE: c-term amidation
  MISC_FEATURE (16)..(20): Lactam ring between side chains at positions 16 and 20
HSQGTFTSDYSKYLDKRRAEDFVQWLMDT

SEQ ID NO: 380 - protein, 29 aa, Artificial Sequence
  Synthetic peptide
  MISC_FEATURE: c-term amidation
HSQGTFTSDYSKYLDERAAKDFVQWLMDT

SEQ ID NO: 381 - protein, 29 aa, Artificial Sequence
  Synthetic peptide
  MISC_FEATURE: c-term amidation; lactam ring between side chains at positions 16 and 20
HSQGTFTSDYSKYLDERAAKDFVQWLMDT

SEQ ID NO: 382 - protein, 29 aa, Artificial Sequence
  Synthetic peptide
  MISC_FEATURE: c-term amidation
  MISC_FEATURE (12)..(16): Lactam ring between side chains at positions 12 and 16
HSQGTFTSDYSKYLDERAAQDFVQWLMDT

SEQ ID NO: 383 - protein, 29 aa, Artificial Sequence
  Synthetic peptide
  MISC_FEATURE: c-term amidation
  MISC_FEATURE (12)..(16): Lactam ring between side chains at positions 12 and 16
HSQGTFTSDYSKYLDERAAKDFVQWLMDT

SEQ ID NO: 384 - protein, 29 aa, Artificial Sequence
  Synthetic peptide
  MISC_FEATURE: c-term amidation
  MISC_FEATURE (16)..(20): Lactam ring between side chains at positions 16 and 20
HSQGTFTSDYSKYLDKRAAEDFVQWLMDT

SEQ ID NO: 385 - protein, 29 aa, Artificial Sequence
  Synthetic peptide
  MISC_FEATURE: c-term amidation
HSQGTFTSDYSKYLDEQAAKEFIAWLMDT

SEQ ID NO: 386 - protein, 29 aa, Artificial Sequence
  Synthetic peptide
  MISC_FEATURE: c-term amidation
  MISC_FEATURE (12)..(16): Lactam ring between side chains at positions 12 and 16
HSQGTFTSDYSKYLDEQAAKEFIAWLMDT

SEQ ID NO: 387 - protein, 29 aa, Artificial Sequence
  Synthetic peptide
  MISC_FEATURE: c-term amidation
  MISC_FEATURE (16)..(20): Lactam ring between side chains at positions 16 and 20
HSQGTFTSDYSKYLDEQAAKEFIAWLMDT

SEQ ID NO: 388 - protein, 29 aa, Artificial Sequence
  Synthetic peptide
  MISC_FEATURE: c-term amidation
  MOD_RES (1)..(1): (Des-amino)His
XSQGTFTSDYSKYLDERRAQDFVQWLMDT

SEQ ID NO: 389 - protein, 29 aa, Artificial Sequence
  Synthetic peptide
  MISC_FEATURE: c-term amidation
  MOD_RES (1)..(1): (Des-amino)His
XSQGTFTSDYSKYLDERRAKDFVQWLMDT

SEQ ID NO: 390 - protein, 29 aa, Artificial Sequence
  Synthetic peptide
  MISC_FEATURE: c-term amidation
  MOD_RES (1)..(1): (Des-amino)His
  MISC_FEATURE (16)..(20): Lactam ring between side chains at positions 16 and 20
XSQGTFTSDYSKYLDERRAKDFVQWLMDT

SEQ ID NO: 391 - protein, 29 aa, Artificial Sequence
  Synthetic peptide
  MISC_FEATURE: c-term amidation
  MOD_RES (1)..(1): (Des-amino)His
  MISC_FEATURE (12)..(16): Lactam ring between side chains at positions 12 and 16
XSQGTFTSDYSKYLDERRAQDFVQWLMDT

SEQ ID NO: 392 - protein, 29 aa, Artificial Sequence
  Synthetic peptide
  misc_feature (1)..(1): Xaa can be any naturally occurring amino acid
XSQGTFTSDYSKYLDERRAKDFVQWLMDT

SEQ ID NO: 393 - protein, 29 aa, Artificial Sequence
  Synthetic peptide
  MISC_FEATURE: c-term amidation
  MOD_RES (1)..(1): (Des-amino)His
  MISC_FEATURE (16)..(20): Lactam ring between side chains at positions 16 and 20
XSQGTFTSDYSKYLDKRRAEDFVQWLMDT

SEQ ID NO: 394 - protein, 29 aa, Artificial Sequence
  Synthetic peptide
  MISC_FEATURE: c-term amidation
  MOD_RES (1)..(1): (Des-amino)His
XSQGTFTSDYSKYLDERAAKDFVQWLMDT

SEQ ID NO: 395 - protein, 29 aa, Artificial Sequence
  Synthetic peptide
  MISC_FEATURE: c-term amidation
  MOD_RES (1)..(1): (Des-amino)His
  MISC_FEATURE (16)..(20): Lactam ring between side chains at positions 16 and 20
XSQGTFTSDYSKYLDERAAKDFVQWLMDT

SEQ ID NO: 396 - protein, 29 aa, Artificial Sequence
  Synthetic peptide
  MISC_FEATURE: c-term amidation
  MOD_RES (1)..(1): (Des-amino)His
  MISC_FEATURE (12)..(16): Lactam ring between side chains at positions 12 and 16
XSQGTFTSDYSKYLDERAAQDFVQWLMDT

SEQ ID NO: 397 - protein, 29 aa, Artificial Sequence
  Synthetic peptide
  MISC_FEATURE: c-term amidation
  MOD_RES (1)..(1): (Des-amino)His
  MISC_FEATURE (12)..(16): Lactam ring between side chains at positions 12 and 16
XSQGTFTSDYSKYLDERAAKDFVQWLMDT

SEQ ID NO: 398 - protein, 29 aa, Artificial Sequence
  Synthetic peptide
  MISC_FEATURE: c-term amidation
  MOD_RES (1)..(1): (Des-amino)His
  MISC_FEATURE (16)..(20): Lactam ring between side chains at positions 16 and 20
XSQGTFTSDYSKYLDKRAAEDFVQWLMDT

SEQ ID NO: 399 - protein, 29 aa, Artificial Sequence
  Synthetic peptide
  MISC_FEATURE: c-term amidation
  MOD_RES (1)..(1): (Des-amino)His
XSQGTFTSDYSKYLDEQAAKEFIAWLMDT

SEQ ID NO: 400 - protein, 29 aa, Artificial Sequence
  Synthetic peptide
  MISC_FEATURE: c-term amidation
  MOD_RES (1)..(1): (Des-amino)His
  MISC_FEATURE (12)..(16): Lactam ring between side chains at positions 12 and 16
XSQGTFTSDYSKYLDEQAAKEFIAWLMDT

SEQ ID NO: 401 - protein, 29 aa, Artificial Sequence
  Synthetic peptide
  MISC_FEATURE: c-term amidation
  MOD_RES (1)..(1): (Des-amino)His
  MISC_FEATURE (16)..(20): Lactam ring between side chains at positions 16 and 20
XSQGTFTSDYSKYLDEQAAKEFIAWLMDT

SEQ ID NO: 402 - protein, 29 aa, Artificial Sequence
  Synthetic peptide
  MISC_FEATURE: c-term amidation
  MOD_RES (2)..(2): Aminoisobutyric acid
HXQGTFTSDYSKYLDERRAQDFVQWLMDT

SEQ ID NO: 403 - protein, 29 aa, Artificial Sequence
  Synthetic peptide
  MISC_FEATURE: c-term amidation
  MOD_RES (2)..(2): Aminoisobutyric acid
HXQGTFTSDYSKYLDERRAKDFVQWLMDT

SEQ ID NO: 404 - protein, 29 aa, Artificial Sequence
  Synthetic peptide
  MISC_FEATURE: c-term amidation
  MOD_RES (2)..(2): Aminoisobutyric acid
  MISC_FEATURE (16)..(20): Lactam ring between side chains at positions 16 and 20
HXQGTFTSDYSKYLDERRAKDFVQWLMDT

SEQ ID NO: 405 - protein, 29 aa, Artificial Sequence
  Synthetic peptide
  MISC_FEATURE: c-term amidation
  MOD_RES (2)..(2): aminoisobutyric acid
  MISC_FEATURE (12)..(16): Lactam ring between side chains at positions 12 and 16
HXQGTFTSDYSKYLDERRAQDFVQWLMDT

SEQ ID NO: 406 - protein, 29 aa, Artificial Sequence
  Synthetic peptide
  MISC_FEATURE: c-term amidation
  MOD_RES (2)..(2): Aminoisobutyric acid
  MISC_FEATURE (12)..(16): Lactam ring between side chains at positions 12 and 16
HXQGTFTSDYSKYLDERRAKDFVQWLMDT

SEQ ID NO: 407 - protein, 29 aa, Artificial Sequence
  Synthetic peptide
  MISC_FEATURE: c-term amidation
  MOD_RES (2)..(2): Aminoisobutyric acid
  MISC_FEATURE (16)..(20): Lactam ring between side chains at positions 16 and 20
HXQGTFTSDYSKYLDKRRAEDFVQWLMDT

SEQ ID NO: 408 - protein, 29 aa, Artificial Sequence
  Synthetic peptide
  MOD_RES (2)..(2): Aminoisobutyric acid
  MISC_FEATURE (2)..(2): c-term amidation
HXQGTFTSDYSKYLDERAAKDFVQWLMDT

SEQ ID NO: 409 - protein, 29 aa, Artificial Sequence
  Synthetic peptide
  MISC_FEATURE: c-term amidation
  MOD_RES (2)..(2): Aminoisobutyric acid
  MISC_FEATURE (16)..(20): Lactam ring between side chains at positions 16 and 20
HXQGTFTSDYSKYLDERAAKDFVQWLMDT

SEQ ID NO: 410 - protein, 29 aa, Artificial Sequence
  Synthetic peptide
  MISC_FEATURE: c-term amidation
  MOD_RES (2)..(2): Aminoisobutyric acid
  MISC_FEATURE (12)..(16): Lactam ring between side chains at positions 12 and 16
HXQGTFTSDYSKYLDERAAQDFVQWLMDT

SEQ ID NO: 411 - protein, 29 aa, Artificial Sequence
  Synthetic peptide
  MISC_FEATURE: c-term amidation
  MOD_RES (2)..(2): Aminoisobutyric acid
  MISC_FEATURE (12)..(16): Lactam ring between side chains at positions 12 and 16
HXQGTFTSDYSKYLDERAAKDFVQWLMDT

SEQ ID NO: 412 - protein, 29 aa, Artificial Sequence
  Synthetic peptide
  MISC_FEATURE: c-term amidation
  MOD_RES (2)..(2): Aminoisobutyric acid
  MISC_FEATURE (12)..(16): Lactam ring between side chains at positions 16 and 20
HXQGTFTSDYSKYLDKRAAEDFVQWLMDT

SEQ ID NO: 413 - protein, 29 aa, Artificial Sequence
  Synthetic peptide
  MISC_FEATURE: c-term amidation
  MOD_RES (2)..(2): Aminoisobutyric acid
HXQGTFTSDYSKYLDEQAAKEFIAWLMDT

SEQ ID NO: 414 - protein, 29 aa, Artificial Sequence
  Synthetic peptide
  MISC_FEATURE: c-term amidation
  MOD_RES (2)..(2): Aminoisobutyric acid
  MISC_FEATURE (12)..(16): Lactam ring between side chains at positions 12 and 16
HXQGTFTSDYSKYLDEQAAKEFIAWLMDT

SEQ ID NO: 415 - protein, 29 aa, Artificial Sequence
  Synthetic peptide
  MISC_FEATURE: c-term amidation
  MOD_RES (2)..(2): Aminoisobutyric acid
  MISC_FEATURE (16)..(20): Lactam ring between side chains at positions 16 and 20
HXQGTFTSDYSKYLDEQAAKEFIAWLMDT

SEQ ID NO: 416 - protein, 29 aa, Artificial Sequence
  Synthetic peptide
  MISC_FEATURE: c-term amidation
  MOD_RES (2)..(2): D-Ala
HXQGTFTSDYSKYLDERRAQDFVQWLMDT

SEQ ID NO: 417 - protein, 29 aa, Artificial Sequence
  Synthetic peptide
  MISC_FEATURE: c-term amidation
  MOD_RES (2)..(2): D-Ala
HXQGTFTSDYSKYLDERRAKDFVQWLMDT

SEQ ID NO: 418 - protein, 29 aa, Artificial Sequence
  Synthetic peptide
  MISC_FEATURE: c-term amidation
  MOD_RES (2)..(2): D-Ala
  MISC_FEATURE (16)..(20): Lactam ring between side chains at positions 16 and 20
HXQGTFTSDYSKYLDERRAKDFVQWLMDT

SEQ ID NO: 419 - protein, 29 aa, Artificial Sequence
  Synthetic peptide
  MISC_FEATURE: c-term amidation
  MOD_RES (2)..(2): D-Ala
  MISC_FEATURE (12)..(16): Lactam ring between side chains at positions 12 and 16
HXQGTFTSDYSKYLDERRAQDFVQWLMDT

SEQ ID NO: 420 - protein, 29 aa, Artificial Sequence
  Synthetic peptide
  MISC_FEATURE: c-term amidation
  MOD_RES (2)..(2): D-Ala
  MISC_FEATURE (12)..(16): Lactam ring between side chains at positions 12 and 16
HXQGTFTSDYSKYLDERRAKDFVQWLMDT

SEQ ID NO: 421 - protein, 29 aa, Artificial Sequence
  Synthetic peptide
  MISC_FEATURE: c-term amidation
  MOD_RES (2)..(2): D-Ala
  MISC_FEATURE (16)..(20): Lactam ring between side chains at positions 16 and 20
HXQGTFTSDYSKYLDKRRAEDFVQWLMDT

SEQ ID NO: 422 - protein, 29 aa, Artificial Sequence
  Synthetic peptide
  MISC_FEATURE: c-term amidation
  MOD_RES (2)..(2): D-Ala
HXQGTFTSDYSKYLDERAAKDFVQWLMDT

SEQ ID NO: 423 - protein, 29 aa, Artificial Sequence
  Synthetic peptide
  MISC_FEATURE: c-term amidation
  MOD_RES (2)..(2): D-Ala
  MISC_FEATURE (16)..(20): Lactam ring between side chains at positions 16 and 20
HXQGTFTSDYSKYLDERAAKDFVQWLMDT

SEQ ID NO: 424 - protein, 29 aa, Artificial Sequence
  Synthetic peptide
  MISC_FEATURE: c-term amidation
  MOD_RES (2)..(2): D-Ala
  MISC_FEATURE (12)..(16): Lactam ring between side chains at positions 12 and 16
HXQGTFTSDYSKYLDERAAQDFVQWLMDT

SEQ ID NO: 425 - protein, 29 aa, Artificial Sequence
  Synthetic peptide
  MISC_FEATURE: c-term amidation
  MOD_RES (2)..(2): D-Ala
  MISC_FEATURE (12)..(16): Lactam ring between side chains at positions 12 and 16
HXQGTFTSDYSKYLDERAAKDFVQWLMDT

SEQ ID NO: 426 - protein, 29 aa, Artificial Sequence
  Synthetic peptide
  MISC_FEATURE: c-term amidation
  MOD_RES (2)..(2): D-Ala
  MISC_FEATURE (16)..(20): Lactam ring between side chains at positions 16 and 20
HXQGTFTSDYSKYLDKRAAEDFVQWLMDT

SEQ ID NO: 427 - protein, 29 aa, Artificial Sequence
  Synthetic peptide
  MISC_FEATURE: c-term amidation
  MOD_RES (2)..(2): D-Ala
HXQGTFTSDYSKYLDEQAAKEFIAWLMDT

SEQ ID NO: 428 - protein, 29 aa, Artificial Sequence
  Synthetic peptide
  MISC_FEATURE: c-term amidation
  MOD_RES (2)..(2): D-Ala
  MISC_FEATURE (12)..(16): Lactam ring between side chains at positions 12 and 16
HXQGTFTSDYSKYLDEQAAKEFIAWLMDT

SEQ ID NO: 429 - protein, 29 aa, Artificial Sequence
  Synthetic peptide
  MISC_FEATURE: c-term amidation
  MOD_RES (2)..(2): D-Ala
  MISC_FEATURE (16)..(20): Lactam ring between side chains at positions 16 and 20
HXQGTFTSDYSKYLDEQAAKEFIAWLMDT

SEQ ID NO: 430 - protein, 29 aa, Artificial Sequence
  Synthetic peptide
  MISC_FEATURE: c-term amidation
HSEGTFTSDYSKYLDERRAQDFVQWLMDT

SEQ ID NO: 431 - protein, 29 aa, Artificial Sequence
  Synthetic peptide
  MISC_FEATURE: c-term amidation
HSEGTFTSDYSKYLDERRAKDFVQWLMDT

SEQ ID NO: 432 - protein, 29 aa, Artificial Sequence
  Synthetic peptide
  MISC_FEATURE: c-term amidation
  MISC_FEATURE (16)..(20): Lactam ring between side chains at positions 16 and 20
HSEGTFTSDYSKYLDERRAKDFVQWLMDT

SEQ ID NO: 433 - protein, 29 aa, Artificial Sequence
  Synthetic peptide
  MISC_FEATURE: c-term amidation
  MISC_FEATURE (16)..(16): Lactam ring between side chains at positions 12 and 16
HSEGTFTSDYSKYLDERRAQDFVQWLMDT

SEQ ID NO: 434 - protein, 29 aa, Artificial Sequence
  Synthetic peptide
  MISC_FEATURE: c-term amidation
  MISC_FEATURE (12)..(16): Lactam ring between side chains at positions 12 and 16
HSEGTFTSDYSKYLDERRAKDFVQWLMDT

SEQ ID NO: 435 - protein, 29 aa, Artificial Sequence
  Synthetic peptide
  MISC_FEATURE: c-term amidation
  MISC_FEATURE (16)..(20): Lactam ring between side chains at positions 16 and 20
HSEGTFTSDYSKYLDKRRAEDFVQWLMDT

SEQ ID NO: 436 - protein, 29 aa, Artificial Sequence
  Synthetic peptide
  MISC_FEATURE: c-term amidation
HSEGTFTSDYSKYLDERAAKDFVQWLMDT

SEQ ID NO: 437 - protein, 29 aa, Artificial Sequence
  Synthetic peptide
  MISC_FEATURE: c-term amidation
  MISC_FEATURE: Lactam ring between side chains at positions 16 and 20
HSEGTFTSDYSKYLDERAAKDFVQWLMDT

SEQ ID NO: 438 - protein, 29 aa, Artificial Sequence
  Synthetic peptide
  MISC_FEATURE: c-term amidation
  MISC_FEATURE (12)..(16): Lactam ring between side chains at positions 12 and 16
HSEGTFTSDYSKYLDERAAQDFVQWLMDT

SEQ ID NO: 439 - protein, 29 aa, Artificial Sequence
  Synthetic peptide
  MISC_FEATURE: c-term amidation
  MISC_FEATURE (12)..(16): Lactam ring between side chains at positions 12 and 16
HSEGTFTSDYSKYLDERAAKDFVQWLMDT

SEQ ID NO: 440 - protein, 29 aa, Artificial Sequence
  Synthetic peptide
  MISC_FEATURE: c-term amidation
  MISC_FEATURE (16)..(20): Lactam ring between side chains at positions 16 and 20
HSEGTFTSDYSKYLDKRAAEDFVQWLMDT

SEQ ID NO: 441 - protein, 29 aa, Artificial Sequence
  Synthetic peptide
  MISC_FEATURE: c-term amidation
HSEGTFTSDYSKYLDEQAAKEFIAWLMDT

SEQ ID NO: 442 - protein, 29 aa, Artificial Sequence
  Synthetic peptide
  MISC_FEATURE: c-term amidation
  MISC_FEATURE (12)..(16): Lactam ring between side chains at positions 12 and 16
HSEGTFTSDYSKYLDEQAAKEFIAWLMDT

SEQ ID NO: 443 - protein, 29 aa, Artificial Sequence
  Synthetic peptide
  MISC_FEATURE: c-term amidation
  MISC_FEATURE (16)..(20): Lactam ring between side chains at positions 16 and 20
HSEGTFTSDYSKYLDEQAAKEFIAWLMDT

SEQ ID NO: 444 - protein, 29 aa, Artificial Sequence
  Synthetic peptide
  MISC_FEATURE: c-term amidation
  MOD_RES (1)..(1): (Des-amino)His
XSEGTFTSDYSKYLDERRAQDFVQWLMDT

SEQ ID NO: 445 - protein, 29 aa, Artificial Sequence
  Synthetic peptide
  MISC_FEATURE: c-term amidation
  MOD_RES (1)..(1): (Des-amino)His
XSEGTFTSDYSKYLDERRAKDFVQWLMDT

SEQ ID NO: 446 - protein, 29 aa, Artificial Sequence
  Synthetic peptide
  MISC_FEATURE: c-term amidation
  MOD_RES (1)..(1): (Des-amino)His
  MISC_FEATURE (16)..(20): Lactam ring between side chains at positions 16 and 20
XSEGTFTSDYSKYLDERRAKDFVQWLMDT

SEQ ID NO: 447 - protein, 29 aa, Artificial Sequence
  Synthetic peptide
  MISC_FEATURE: c-term amidation
  MISC_FEATURE: Lactam ring between side chains at positions 12 and 16
  MOD_RES (1)..(1): (Des-amino)His
XSEGTFTSDYSKYLDERRAQDFVQWLMDT

SEQ ID NO: 448 - protein, 29 aa, Artificial Sequence
  Synthetic peptide
  MISC_FEATURE: c-term amidation
  MOD_RES (1)..(1): (Des-amino)His
  MISC_FEATURE (12)..(16): Lactam ring between side chains at positions 12 and 16
XSEGTFTSDYSKYLDERRAKDFVQWLMDT

SEQ ID NO: 449 - protein, 29 aa, Artificial Sequence
  Synthetic peptide
  MISC_FEATURE: c-term amidation
  MOD_RES (1)..(1): (Des-amino)His
  MISC_FEATURE (16)..(20): Lactam ring between side chains at positions 16 and 20
XSEGTFTSDYSKYLDKRRAEDFVQWLMDT

SEQ ID NO: 450 - protein, 29 aa, Artificial Sequence
  Synthetic peptide
  MISC_FEATURE: c-term amidation
  MOD_RES (1)..(1): (Des-amino)His
XSEGTFTSDYSKYLDERAAKDFVQWLMDT

SEQ ID NO: 451 - protein, 29 aa, Artificial Sequence
  Synthetic peptide
  MISC_FEATURE: c-term amidation
  MOD_RES (1)..(1): (Des-amino)His
  MISC_FEATURE (16)..(20): Lactam ring between side chains at positions 16 and 20
XSEGTFTSDYSKYLDERAAKDFVQWLMDT

SEQ ID NO: 452 - protein, 29 aa, Artificial Sequence
  Synthetic peptide
  MISC_FEATURE: C-term amidation
  MOD_RES (1)..(1): (Des-amino)His
  MISC_FEATURE (12)..(16): Lactam ring between side chains at positions 12 and 16
XSEGTFTSDYSKYLDERAAQDFVQWLMDT

SEQ ID NO: 453 - protein, 29 aa, Artificial Sequence
  Synthetic peptide
  MISC_FEATURE: c-term amidation
  MOD_RES (1)..(1): (Des-amino)His
  MISC_FEATURE (12)..(16): Lactam ring between side chains at positions 12 and 16
XSEGTFTSDYSKYLDERAAKDFVQWLMDT

SEQ ID NO: 454 - protein, 29 aa, Artificial Sequence
  Synthetic peptide
  MISC_FEATURE: c-term amidation
  MOD_RES (1)..(1): (Des-amino)His
  MISC_FEATURE (16)..(20): Lactam ring between side chains at positions 16 and 20
XSEGTFTSDYSKYLDKRAAEDFVQWLMDT

SEQ ID NO: 455 - protein, 29 aa, Artificial Sequence
  Synthetic peptide
  MISC_FEATURE: c-term amidation
  MOD_RES (1)..(1): (Des-amino)His
XSEGTFTSDYSKYLDEQAAKEFIAWLMDT

SEQ ID NO: 456 - protein, 29 aa, Artificial Sequence
  Synthetic peptide
  MISC_FEATURE: c-term amidation
  MOD_RES (1)..(1): (Des-amino)His
  MISC_FEATURE (12)..(16): Lactam ring between side chains at positions 12 and 16
XSEGTFTSDYSKYLDEQAAKEFIAWLMDT

SEQ ID NO: 457 - protein, 29 aa, Artificial Sequence
  Synthetic peptide
  MISC_FEATURE: c-term amidation
  MOD_RES (1)..(1): (Des-amino)His
  MISC_FEATURE (16)..(20): Lactam ring between side chains at positions 16 and 20
XSEGTFTSDYSKYLDEQAAKEFIAWLMDT

SEQ ID NO: 458 - protein, 29 aa, Artificial Sequence
  Synthetic peptide
  MISC_FEATURE: c-term amidation
  MOD_RES (2)..(2): Aminoisobutyric acid
HXEGTFTSDYSKYLDERRAQDFVQWLMDT

SEQ ID NO: 459 - protein, 29 aa, Artificial Sequence
  Synthetic peptide
  MISC_FEATURE: c-term amidation
  MOD_RES (2)..(2): Aminoisobutyric acid
HXEGTFTSDYSKYLDERRAKDFVQWLMDT

SEQ ID NO: 460 - protein, 29 aa, Artificial Sequence
  Synthetic peptide
  MISC_FEATURE: c-term amidation
  MOD_RES (2)..(2): Aminoisobutyric acid
  MISC_FEATURE (16)..(20): Lactam ring between side chains at positions 16 and 20
HXEGTFTSDYSKYLDERRAKDFVQWLMDT

SEQ ID NO: 461 - protein, 29 aa, Artificial Sequence
  Synthetic peptide
  MISC_FEATURE: c-term amidation
  MOD_RES (2)..(2): Aminoisobutyric acid
  MISC_FEATURE (12)..(16): Lactam ring between side chains at positions 12 and 16
HXEGTFTSDYSKYLDERRAQDFVQWLMDT

SEQ ID NO: 462 - protein, 29 aa, Artificial Sequence
  Synthetic peptide
  MISC_FEATURE: c-term amidation
  MOD_RES (2)..(2): Aminoisobutyric acid
  MISC_FEATURE (12)..(16): Lactam ring between side chains at positions 12 and 16
HXEGTFTSDYSKYLDERRAKDFVQWLMDT

SEQ ID NO: 463 - protein, 29 aa, Artificial Sequence
  Synthetic peptide
  MISC_FEATURE: c-term amidation
  MOD_RES (2)..(2): Aminoisobutyric acid
  MISC_FEATURE (16)..(20): Lactam ring between side chains at positions 16 and 20
HXEGTFTSDYSKYLDKRRAEDFVQWLMDT

SEQ ID NO: 464 - protein, 29 aa, Artificial Sequence
  Synthetic peptide
  MISC_FEATURE: c-term amidation
  MOD_RES (2)..(2): Aminoisobutyric acid
HXEGTFTSDYSKYLDERAAKDFVQWLMDT

SEQ ID NO: 465 - protein, 29 aa, Artificial Sequence
  Synthetic peptide
  MISC_FEATURE: c-term amidation
  MOD_RES (2)..(2): Aminoisobutyric acid
  MISC_FEATURE (16)..(20): Lactam ring between side chains at positions 16 and 20
HXEGTFTSDYSKYLDERAAKDFVQWLMDT

SEQ ID NO: 466 - protein, 29 aa, Artificial Sequence
  Synthetic peptide
  MISC_FEATURE: c-term amidation
  MOD_RES (2)..(2): Aminoisobutyric acid
  MISC_FEATURE (12)..(16): Lactam ring between side chains at postions 12 and 16
HXEGTFTSDYSKYLDERAAQDFVQWLMDT

SEQ ID NO: 467 - protein, 29 aa, Artificial Sequence
  Synthetic peptide
  MISC_FEATURE: c-term amidation
  MOD_RES (2)..(2): Aminoisobutyric acid
  MISC_FEATURE (12)..(16): Lactam ring between side chains at positions 12 and 16
HXEGTFTSDYSKYLDERAAKDFVQWLMDT

SEQ ID NO: 468 - protein, 29 aa, Artificial Sequence
  Synthetic peptide
  MISC_FEATURE: c-term amidation
  MOD_RES (2)..(2): Aminoisobutyric acid
  MISC_FEATURE (12)..(16): Lactam ring between side chains at positions 16 and 20
HXEGTFTSDYSKYLDKRAAEDFVQWLMDT

SEQ ID NO: 469 - protein, 29 aa, Artificial Sequence
  Synthetic peptide
  MISC_FEATURE: c-term amidation
  MOD_RES (2)..(2): Aminoisobutyric acid
HXEGTFTSDYSKYLDEQAAKEFIAWLMDT

SEQ ID NO: 470 - protein, 29 aa, Artificial Sequence
  Synthetic peptide
  MISC_FEATURE: c-term amidation
  MOD_RES (2)..(2): Aminoisobutyric acid
  MISC_FEATURE (12)..(16): Lactam ring between side chains at positions 12 and 16
HXEGTFTSDYSKYLDEQAAKEFIAWLMDT

SEQ ID NO: 471 - protein, 29 aa, Artificial Sequence
  Synthetic peptide
  MISC_FEATURE: c-term amidation
  MOD_RES (2)..(2): Aminoisobutyric acid
  MISC_FEATURE (16)..(20): Lactam ring between side chains at positions 16 and 20
HXEGTFTSDYSKYLDEQAAKEFIAWLMDT

SEQ ID NO: 472 - protein, 29 aa, Artificial Sequence
  Synthetic peptide
  MISC_FEATURE: c-term amidation
  MOD_RES (2)..(2): D-Ala
HXEGTFTSDYSKYLDERRAQDFVQWLMDT

SEQ ID NO: 473 - protein, 29 aa, Artificial Sequence
  Synthetic peptide
  MISC_FEATURE: c-term amidation
  MOD_RES (2)..(2): D-Ala
HXEGTFTSDYSKYLDERRAKDFVQWLMDT

SEQ ID NO: 474 - protein, 29 aa, Artificial Sequence
  Synthetic peptide
  MISC_FEATURE: c-term amidation
  MOD_RES (2)..(2): D-Ala
  MISC_FEATURE (16)..(20): Lactam ring between side chains at positions 16 and 20
HXEGTFTSDYSKYLDERRAKDFVQWLMDT

SEQ ID NO: 475 - protein, 29 aa, Artificial Sequence
  Synthetic peptide
  MISC_FEATURE: c-term amidation
  MOD_RES (2)..(2): D-Ala
  MISC_FEATURE (12)..(16): Lactam ring between side chains at positions 12 and 16
HXEGTFTSDYSKYLDERRAQDFVQWLMDT

SEQ ID NO: 476 - protein, 29 aa, Artificial Sequence
  Synthetic peptide
  MISC_FEATURE: c-term amidation
  MOD_RES (2)..(2): D-Ala
  MISC_FEATURE (12)..(16): Lactam ring between side chains at positions 12 and 16
HXEGTFTSDYSKYLDERRAKDFVQWLMDT

SEQ ID NO: 477 - protein, 29 aa, Artificial Sequence
  Synthetic peptide
  MISC_FEATURE: c-term amidation
  MOD_RES (2)..(2): D-Ala
  MISC_FEATURE (16)..(20): Lactam ring between side chains at positions 16 and 20
HXEGTFTSDYSKYLDKRRAEDFVQWLMDT

SEQ ID NO: 478 - protein, 29 aa, Artificial Sequence
  Synthetic peptide
  MISC_FEATURE: c-term amidation
  MOD_RES (2)..(2): D-Ala
HXEGTFTSDYSKYLDERAAKDFVQWLMDT

SEQ ID NO: 479 - protein, 29 aa, Artificial Sequence
  Synthetic peptide
  MISC_FEATURE: c-term amidation
  MOD_RES (2)..(2): D-Ala
  MISC_FEATURE (16)..(20): Lactam ring between side chains at positions 16 and 20
HXEGTFTSDYSKYLDERAAKDFVQWLMDT

SEQ ID NO: 480 - protein, 29 aa, Artificial Sequence
  Synthetic peptide
  MISC_FEATURE: c-term amidation
  MOD_RES (2)..(2): D-Ala
  MISC_FEATURE (12)..(16): Lactam ring between side chains at positions 12 and 16
HXEGTFTSDYSKYLDERAAQDFVQWLMDT

SEQ ID NO: 481 - protein, 29 aa, Artificial Sequence
  Synthetic peptide
  MISC_FEATURE: c-term amidation
  MOD_RES (2)..(2): D-Ala
  MISC_FEATURE (12)..(16): Lactam ring between side chains at positions 12 and 16
HXEGTFTSDYSKYLDERAAKDFVQWLMDT

SEQ ID NO: 482 - protein, 29 aa, Artificial Sequence
  Synthetic peptide
  MISC_FEATURE: c-term amidation
  MOD_RES (2)..(2): D-Ala
  MISC_FEATURE (16)..(20): Lactam ring between side chains at positions 16 and 20
HXEGTFTSDYSKYLDKRAAEDFVQWLMDT

SEQ ID NO: 483 - protein, 29 aa, Artificial Sequence
  Synthetic peptide
  MISC_FEATURE: c-term amidation
  MOD_RES (2)..(2): D-Ala
HXEGTFTSDYSKYLDEQAAKEFIAWLMDT

SEQ ID NO: 484 - protein, 29 aa, Artificial Sequence
  Synthetic peptide
  MISC_FEATURE: c-term amidation
  MOD_RES (2)..(2): D-Ala
  MISC_FEATURE (12)..(16): Lactam ring between side chains at positions 12 and 16
HXEGTFTSDYSKYLDEQAAKEFIAWLMDT

SEQ ID NO: 485 - protein, 29 aa, Artificial Sequence
  Synthetic peptide
  MISC_FEATURE: c-term amidation
  MOD_RES (2)..(2): D-Ala
  MISC_FEATURE (16)..(20): Lactam ring between side chains at positions 16 and 20
HXEGTFTSDYSKYLDEQAAKEFIAWLMDT

SEQ ID NO: 486 - protein, 29 aa, Artificial Sequence
  Synthetic peptide
  MISC_FEATURE: c-term amidation
  MOD_RES (2)..(2): Aminoisobutyric acid
  MOD_RES (24)..(24): Cys-PEG
HXQGTFTSDYSKYLDEQAAKEFICWLMNT

SEQ ID NO: 487 - protein, 29 aa, Artificial Sequence
  Synthetic peptide
  MISC_FEATURE: c-term amidation
  MOD_RES (2)..(2): Aminoisobutyric acid
  MOD_RES (29)..(29): Cys-PEG
HXQGTFTSDYSKYLDEQAAKEFIAWLMNC

SEQ ID NO: 488 - protein, 40 aa, Artificial Sequence
  Synthetic peptide
  MISC_FEATURE: c-term amidation
  MOD_RES (2)..(2): Aminoisobutyric acid
  MOD_RES (40)..(40): Cys-PEG
HXQGTFTSDYSKYLDEQAAKEFIAWLMNGGPSSGAPPPSC

SEQ ID NO: 489 - protein, 40 aa, Artificial Sequence; identical to SEQ ID NO: 488
  Synthetic peptide
  MISC_FEATURE: c-term amidation
  MOD_RES (2)..(2): Aminoisobutyric acid
  MISC_FEATURE (16)..(20): Lactam ring between side chains at positions 16 and 20
  MOD_RES (40)..(40): Cys-PEG

SEQ ID NO: 490 - protein, 39 aa, Artificial Sequence
  Synthetic peptide
  MISC_FEATURE: c-term amidation
  MOD_RES (2)..(2): Aminoisobutyric acid
  MOD_RES (24)..(24): Cys-PEG
HXQGTFTSDYSKYLDEQAAKEFICWLMNGGPSSGAPPPS

SEQ ID NO: 491 - protein, 39 aa, Artificial Sequence; identical to SEQ ID NO: 490
  Synthetic peptide
  MISC_FEATURE: c-term amidation
  MOD_RES (2)..(2): Aminoisobutyric acid
  MISC_FEATURE (16)..(20): Lactam ring between side chains at positions 16 and 20
  MOD_RES (24)..(24): Cys-PEG

SEQ ID NO: 492 - protein, 29 aa, Artificial Sequence
  Synthetic peptide
  MISC_FEATURE: c-term amidation
  MOD_RES (2)..(2): Aminoisobutyric acid
  MOD_RES (24)..(24): Cys-PEG
HXQGTFTSDYSKYLDERAAKDFVCWLMNT

SEQ ID NO: 493 - protein, 29 aa, Artificial Sequence
  Synthetic peptide
  MISC_FEATURE: c-term amidation
  MOD_RES (2)..(2): Aminoisobutyric acid
  MOD_RES (24)..(24): Cys-PEG
HXQGTFTSDYSKYLDERAAKDFVQWLMNC

SEQ ID NO: 494 - protein, 40 aa, Artificial Sequence
  Synthetic peptide
  MISC_FEATURE: c-term amidation
  MOD_RES (2)..(2): Aminoisobutyric acid
  MOD_RES (24)..(24): Cys-PEG
HXQGTFTSDYSKYLDERAAKDFVQWLMNGGPSSGAPPPSC

SEQ ID NO: 495 - protein, 40 aa, Artificial Sequence; identical to SEQ ID NO: 494
  Synthetic peptide
  MISC_FEATURE: c-term amidation
  MOD_RES (2)..(2): Aminoisobutyric acid
  MISC_FEATURE (16)..(20): Lactam ring between side chains at positions 16 and 20
  MOD_RES (40)..(40): Cys-PEG

SEQ ID NO: 496 - protein, 39 aa, Artificial Sequence
  Synthetic peptide
  MISC_FEATURE: c-term amidation
  MOD_RES (2)..(2): Aminoisobutyric acid
  MOD_RES (24)..(24): Cys-PEG
HXQGTFTSDYSKYLDERAAKDFVCWLMNGGPSSGAPPPS

SEQ ID NO: 497 - protein, 39 aa, Artificial Sequence; identical to SEQ ID NO: 496
  Synthetic peptide
  MISC_FEATURE: c-term amidation
  MOD_RES (2)..(2): Aminoisobutyric acid
  MISC_FEATURE (16)..(20): Lactam ring between side chains at positions 16 and 20
  MOD_RES (24)..(24): Cys-PEG

SEQ ID NO: 498 - protein, 30 aa, Artificial Sequence
  Synthetic peptide
  MISC_FEATURE: c-term amidation
  MOD_RES (2)..(2): Aminoisobutyric acid
  MOD_RES (24)..(24): Cys-PEG
HXQGTFTSDYSKYLDERRAKDFVCWLMNTA

SEQ ID NO: 499 - protein, 29 aa, Artificial Sequence
  Synthetic peptide
  MISC_FEATURE: c-term amidation
  MOD_RES (2)..(2): Aminoisobutyric acid
  MOD_RES (24)..(24): Cys-PEG
HXQGTFTSDYSKYLDERRAKDFVQWLMNC

SEQ ID NO: 500 - protein, 40 aa, Artificial Sequence
  Synthetic peptide
  MISC_FEATURE: c-term amidation
  MOD_RES (2)..(2): Aminoisobutyric acid
  MOD_RES (40)..(40): Cys-PEG
HXQGTFTSDYSKYLDERRAKDFVQWLMNGGPSSGAPPPSC

SEQ ID NO: 501 - protein, 40 aa, Artificial Sequence; identical to SEQ ID NO: 500
  Synthetic peptide
  MISC_FEATURE: c-term amidation
  MOD_RES (2)..(2): Aminoisobutyric acid
  MISC_FEATURE (16)..(20): Lactam ring between side chains at positions 16 and 20
  MOD_RES (40)..(40): Cys-PEG

SEQ ID NO: 502 - protein, 39 aa, Artificial Sequence
  Synthetic peptide
  MISC_FEATURE: c-term amidation
  MOD_RES (2)..(2): Aminoisobutyric acid
  MOD_RES (24)..(24): Cys-PEG
HXQGTFTSDYSKYLDERRAKDFVCWLMNGGPSSGAPPPS

SEQ ID NO: 503 - protein, 39 aa, Artificial Sequence; identical to SEQ ID NO: 502
  Synthetic peptide
  MISC_FEATURE: c-term amidation
  MOD_RES (2)..(2): Aminoisobutyric acid
  MISC_FEATURE (16)..(20): Lactam ring between side chains at positions 16 and 20
  MOD_RES (24)..(24): Cys-PEG

SEQ ID NO: 504 - protein, 29 aa, Artificial Sequence
  Synthetic peptide
  MISC_FEATURE: c-term amidation
  MOD_RES (2)..(2): Aminoisobutyric acid
  MISC_FEATURE (16)..(20): Lactam ring between side chains at positions 16 and 20
  MOD_RES (24)..(24): Cys-PEG
HXQGTFTSDYSKYLDEQAAKEFICWLMNT

SEQ ID NO: 505 - protein, 29 aa, Artificial Sequence
  Synthetic peptide
  MISC_FEATURE: c-term amidation
  MOD_RES (1)..(1): Alpha, Alpha-Dimethyl Imidiazole Acetic Acid
  MISC_FEATURE (16)..(20): Lactam ring between side chains at positions 16 and 20
  MOD_RES (24)..(24): Cys-PEG
XSQGTFTSDYSKYLDEQAAKEFICWLMNT

SEQ ID NO: 506 - protein, 29 aa, Artificial Sequence
  Synthetic peptide
  MISC_FEATURE: c-term amidation
  MOD_RES (1)..(1): Alpha, Alpha-Dimethly Imidiazole Acetic Acid
  MOD_RES (1)..(1): Alpha, Alpha-Dimethly Imidiazole Acetic Acid
  MISC_FEATURE (16)..(20): Lactam ring between side chains at positions 16 and 20
  MOD_RES (29)..(29): Cys-PEG
XSQGTFTSDYSKYLDEQAAKEFIAWLMNC

SEQ ID NO: 507 - protein, 40 aa, Artificial Sequence
  Synthetic peptide
  MISC_FEATURE: c-term amidation
  MOD_RES (1)..(1): Alpha, Alpha Dimethyl Imidiazole Acetic Acid
  MISC_FEATURE (16)..(20): Lactam ring between side chains at positions 16 and 20
  MOD_RES (40)..(40): Cys-PEG
XSQGTFTSDYSKYLDEQAAKEFIAWLMNGGPSSGAPPPSC

SEQ ID NO: 508 - protein, 40 aa, Artificial Sequence
  Synthetic peptide
  MISC_FEATURE: c-term amidation
  MOD_RES (1)..(1): Alpha, Alpha Dimethyl Imidiazole Acetic Acid
  MISC_FEATURE (16)..(20): Lactam ring between side chains at positions 16 and 20
  MOD_RES (40)..(40): Cys-PEG
XSQGTFTSDYSKYLDERRAKDFVQWLMNGGPSSGAPPPSC

SEQ ID NO: 509 - protein, 39 aa, Artificial Sequence
  Synthetic peptide
  MISC_FEATURE: c-term amidation
  MOD_RES (1)..(1): Alpha, Alpha Dimethyl Imidiazole Acetic Acid
  MISC_FEATURE (16)..(20): Lactam ring between side chains at positions 16 and 20
  MOD_RES (24)..(24): Cys-PEG
XSQGTFTSDYSKYLDEQAAKEFICWLMNGGPSSGAPPPS

SEQ ID NO: 510 - protein, 29 aa, Artificial Sequence
  Synthetic peptide
  MISC_FEATURE: c-term amidation
  MOD_RES (1)..(1): Alpha, Alpha Dimethyl Imidiazole Acetic Acid
  misc_feature (2)..(2): Xaa can be any naturally occurring amino acid
  MISC_FEATURE (16)..(20): Lactam ring between side chains at positions 16 and 20
  MOD_RES (24)..(24): Cys-PEG
HXQGTFTSDYSKYLDERRAKDFVCWLMNT

SEQ ID NO: 511 - protein, 29 aa, Artificial Sequence
  Synthetic peptide
  MISC_FEATURE: c-term amidation
  MOD_RES (2)..(2): Alpha, Alpha Dimethyl Imidiazole Acetic Acid
  MISC_FEATURE (16)..(20): Lactam ring between side chains at positions 16 and 20
  MOD_RES (24)..(24): Cys-PEG
HXQGTFTSDYSKYLDERRAKDFVCWLMNT

SEQ ID NO: 512 - protein, 29 aa, Artificial Sequence
  Synthetic peptide
  MISC_FEATURE: c-term amidation
  MOD_RES (1)..(1): Alpha, Alpha Dimethyl Imidiazole Acetic Acid
  MISC_FEATURE (16)..(20): Lactam ring between side chains at positions 16 and 20
  MOD_RES (29)..(29): Cys-PEG
XSQGTFTSDYSKYLDERRAKDFVQWLMNC

SEQ ID NO: 513 - protein, 39 aa, Artificial Sequence
  Synthetic peptide
  MISC_FEATURE: c-term amidation
  MOD_RES (1)..(1): Alpha, Alpha Dimethyl Imidiazole Acetic Acid
  MISC_FEATURE (16)..(20): Lactam ring between side chains at positions 16 and 20
  MOD_RES (24)..(24): Cys-PEG
XSQGTFTSDYSKYLDERRAKDFVCWLMNGGPSSGAPPPS

SEQ ID NO: 514 - protein, 29 aa, Artificial Sequence
  Synthetic peptide
  MISC_FEATURE: c-term amidation
  MISC_FEATURE (16)..(20): Lactam ring between side chains at positions 16 and 20
  MOD_RES (24)..(24): Cys-PEG
HSQGTFTSDYSKYLDEQAAKEFICWLMNT

SEQ ID NO: 515 - protein, 11 aa, Artificial Sequence
  Synthetic peptide
GGPSSGAPPPS

SEQ ID NO: 516 - protein, 12 aa, Artificial Sequence
  Synthetic peptide
  MOD_RES (12)..(12): Cys-PEG
GGPSSGAPPPSC

SEQ ID NO: 517 - protein, 29 aa, Artificial Sequence
  Synthetic peptide
  MISC_FEATURE: c-term amidation
  MOD_RES (2)..(2): Aminoisobutyric acid
  MISC_FEATURE (16)..(20): Lactam ring between side chains at positions 16 and 20
  MOD_RES (24)..(24): Cys-PEG
HXQGTFTSDYSKYLDERRAKDFVCWLMNT

SEQ ID NO: 518 - protein, 29 aa, Artificial Sequence
  Synthetic peptide
  MISC_FEATURE: c-term amidation
  MOD_RES (24)..(24): Cys-PEG
HSQGTFTSDYSKYLDEQAAKEFICWLMNT

SEQ ID NO: 519 - protein, 29 aa, Artificial Sequence
  Synthetic peptide
  MISC_FEATURE: c-term amidation
  MOD_RES (1)..(1): Alpha, Alpha Dimethly Imidiazole Acetic Acid
  MOD_RES (24)..(24): Cys-PEG
XSQGTFTSDYSKYLDEQAAKEFICWLMNT

SEQ ID NO: 520 - protein, 29 aa, Artificial Sequence
  Synthetic peptide
  MISC_FEATURE: c-term amidation
  MOD_RES (1)..(1): Alpha, Alpha Dimethyl Imidiazole Acetic Acid
  MOD_RES (29)..(29): Cys-PEG
XSQGTFTSDYSKYLDEQAAKEFIAWLMNC

SEQ ID NO: 521 - protein, 39 aa, Artificial Sequence; identical to SEQ ID NO: 36
  Synthetic peptide
  MISC_FEATURE: c-term amidation

SEQ ID NO: 522 - protein, 39 aa, Artificial Sequence
  Synthetic peptide
  MISC_FEATURE: c-term amidation
HSQGTFTSDYSKYLDSRRAQDFVQWLMNGGPSSGAPPPS

SEQ ID NO: 523 - protein, 39 aa, Artificial Sequence
  Synthetic peptide
  MISC_FEATURE: c-term amidation
HSQGTFTSDYSKYLDSRRAQDFVQWLMKGGPSSGAPPPS

SEQ ID NO: 524 - protein, 39 aa, Artificial Sequence
  Synthetic peptide
  MISC_FEATURE: c-term amidation
HSQGTFTSDYSKYLDSRRAQDFVQWLVKGGPSSGAPPPS

SEQ ID NO: 525 - protein, 39 aa, Artificial Sequence
  Synthetic peptide
  MISC_FEATURE: c-term amidation
HSQGTFTSDYSKYLDSRRAQDFVQWLMDGGPSSGAPPPS

SEQ ID NO: 526 - protein, 39 aa, Artificial Sequence
  Synthetic peptide
  MISC_FEATURE: c-term amidation
HSQGTFTSDYSKYLDERRAKDFVQWLMDGGPSSGAPPPS

SEQ ID NO: 527 - protein, 30 aa, Artificial Sequence
  Synthetic peptide
  MISC_FEATURE: c-term amidation
HAEGTFTSDVSSYLEGQAAKEFIAWLVKGG

SEQ ID NO: 528 - protein, 29 aa, Artificial Sequence
  Synthetic peptide
  MISC_FEATURE: c-term amidation
  MOD_RES (2)..(2): Aminoisobutyric acid
  MISC_FEATURE (16)..(20): Lactam ring between side chains at positions 16 and 20
  MOD_RES (24)..(24): Cys-PEG
HXQGTFTSDYSKYLDERRAKDFVCWLMNT

SEQ ID NO: 529 - protein, 39 aa, Artificial Sequence; identical to SEQ ID NO: 513
  Synthetic peptide
  MISC_FEATURE: c-term amidation
  MOD_RES (1)..(1): Alpha, Alpha Dimethyl Imidiazole Acetic Acid
  MOD_RES (24)..(24): Cys-PEG

SEQ ID NO: 530 - protein, 29 aa, Artificial Sequence
  Synthetic peptide
  MISC_FEATURE: c-term amidation
  MOD_RES (1)..(1): Alpha, Alpha Dimethyl Imidiazole Acetic Acid
  MOD_RES (24)..(24): Cys-PEG
XSQGTFTSDYSKYLDERRAKDFVCWLMNT

SEQ ID NO: 531 - protein, 40 aa, Artificial Sequence
  Synthetic peptide
  MISC_FEATURE: c-term amidation
  MOD_RES (2)..(2): Aminoisobutyric acid
  MOD_RES (24)..(24): Cys-PEG
  MOD_RES (40)..(40): Cys-PEG
HXQGTFTSDYSKYLDERRAKEFICWLMNGGPSSGAPPPSC

SEQ ID NO: 532 - protein, 41 aa, Artificial Sequence
  Synthetic peptide
  MISC_FEATURE: c-term amidation
  MOD_RES (2)..(2): Aminoisobutyric acid
  MOD_RES (40)..(40): Cys-PEG
  MOD_RES (41)..(41): Cys-PEG
HXQGTFTSDYSKYLDEQAAKEFIAWLMNGGPSSGAPPPSCC

SEQ ID NO: 533 - protein, 39 aa, Artificial Sequence; identical to SEQ ID NO: 490
  Synthetic peptide
  MOD_RES (2)..(2): Aminoisobutyric acid
  MOD_RES (24)..(24): Cys-PEG
  MISC_FEATURE (24)..(24): c-term amidation

SEQ ID NO: 534 - protein, 29 aa, Artificial Sequence
  Synthetic peptide
  MISC_FEATURE: Chimera 2 AIB2 K10-C8 Cys 24-40K
  MISC_FEATURE: c-term amidation
  MOD_RES (2)..(2): Aminoisobutyric acid
  MOD_RES (10)..(10): Acylated with C8 fatty acid
  MOD_RES (24)..(24): Cys-PEG
HXQGTFTSDKSKYLDEQAAKEFICWLMNT

SEQ ID NO: 535 - protein, 29 aa, Artificial Sequence
  Synthetic peptide
  MISC_FEATURE: Chimera 2 AIB2 K10-C14 Cys 24-40K
  MISC_FEATURE: c-term amidation
  MOD_RES (2)..(2): Aminoisobutyric acid
  MOD_RES (10)..(10): Acylated with C14 fatty acid
  MOD_RES (24)..(24): Cys-PEG
HXQGTFTSDKSKYLDEQAAKEFICWLMNT

SEQ ID NO: 536 - protein, 29 aa, Artificial Sequence
  Synthetic peptide
  MISC_FEATURE: Chimera 2 AIB2 K10-C16 Cys24-40K
  MISC_FEATURE: c-term amidation
  MOD_RES (2)..(2): Aminoisobutyric acid
  MOD_RES (10)..(10): Acylated with C16 fatty acid
  MOD_RES (24)..(24): Cys-PEG
HXQGTFTSDKSKYLDEQAAKEFICWLMNT

SEQ ID NO: 537 - protein, 29 aa, Artificial Sequence
  Synthetic peptide
  MISC_FEATURE: Chimera 2 AIB2 K10-C18 Cys24-40K
  MISC_FEATURE: c-term amidation
  MOD_RES (2)..(2): Aminoisobutyric acid
  MOD_RES (10)..(10): Acylated with C18 fatty acid
  MOD_RES (24)..(24): Cys-PEG
HXQGTFTSDKSKYLDEQAAKEFICWLMNT

SEQ ID NO: 538 - protein, 29 aa, Artificial Sequence
  Synthetic peptide
  MISC_FEATURE: Chimera 2 K10-C18 Cys24-40K
  MISC_FEATURE: c-term amidation
  MOD_RES (10)..(10): Acylated with C18 fatty acid
  MOD_RES (24)..(24): Cys-PEG
HSQGTFTSDKSKYLDEQAAKEFICWLMNT

SEQ ID NO: 539 - protein, 29 aa, Artificial Sequence
  Synthetic peptide
  MISC_FEATURE: Glucagon E16 K20 K10-C18 Cys24-40K
  MOD_RES (10)..(10): Acylated with C18 fatty acid
  MOD_RES (24)..(24): Cys-PEG
HSQGTFTSDKSKYLDERRAKDFVCWLMNT

SEQ ID NO: 540 - protein, 29 aa, Artificial Sequence
  Synthetic peptide
  MISC_FEATURE: Glucagon E16 K20 K10-W-C18
  MISC_FEATURE: c-term amidation
  MOD_RES (10)..(10): Covalently bound to Trp residue comprising a C18 fatty acid
HSQGTFTSDKSKYLDERRAKDFVQWLMNT

SEQ ID NO: 541 - protein, 29 aa, Artificial Sequence
  Synthetic peptide
  MISC_FEATURE: Glucagon E16 K20 K10-W-C16 Cys24-40K
  MOD_RES (10)..(10): Covalently bound to Trp residue comprising a C16 fatty acid
  MOD_RES (24)..(24): Cys-PEG
HSQGTFTSDKSKYLDERRAKDFVCWLMNT

SEQ ID NO: 542 - protein, 29 aa, Artificial Sequence
  Synthetic peptide
  MISC_FEATURE: Glucagon E16 K20 K10-C16
  MISC_FEATURE: c-term amidation
  MOD_RES (10)..(10): Covalently bound to C16 fatty acid
HSQGTFTSDKSKYLDERRAKDFVQWLMNT

SEQ ID NO: 543 - protein, 29 aa, Artificial Sequence
  Synthetic peptide
  MISC_FEATURE: Glucagon E16 K20 K10-C16
  MISC_FEATURE: c-term amidation
  MOD_RES (10)..(10): Covalently bound to Trp residue comprising a C16 fatty acid
HSQGTFTSDKSKYLDERRAKDFVQWLMNT

SEQ ID NO: 544 - protein, 29 aa, Artificial Sequence
  Synthetic peptide
  MISC_FEATURE: Glucagon E16 K20 K10-C18
  MISC_FEATURE: c-term amidation
  MOD_RES (10)..(10): Covalently bound to C18 fatty acid
HSQGTFTSDKSKYLDERRAKDFVQWLMNT

SEQ ID NO: 545 - protein, 29 aa, Artificial Sequence
  Synthetic peptide
  MISC_FEATURE: Glucagon E16 K20
  MISC_FEATURE: c-term amidation
HSQGTFTSDYSKYLDERRAKDFVQWLMNT

SEQ ID NO: 546 - protein, 29 aa, Artificial Sequence
  Synthetic peptide
  MISC_FEATURE: Glucagon E16 K20 K10-W-C16 Cys 24-40K
  MISC_FEATURE: c-term amidation
  MOD_RES (10)..(10): Covalently bound to Trp residue comprising C16 fatty acid
  MOD_RES (24)..(24): Cys-PEG
HSQGTFTSDKSKYLDERRAKDFVCWLMNT

SEQ ID NO: 547 - protein, 29 aa, Artificial Sequence
  Synthetic peptide
  MISC_FEATURE: Glucagon E16 K20 K10-C18 Cys24-40K
  MISC_FEATURE: c-term amidation
  MOD_RES (10)..(10): Covalently bound to C18 fatty acid
  MOD_RES (24)..(24): Cys-PEG
HSQGTFTSDKSKYLDERRAKDFVCWLMNT

SEQ ID NO: 548 - protein, 29 aa, Artificial Sequence
  Synthetic peptide
  MISC_FEATURE: Glucagon E16 K20 K10-C18 Cys24-40K
  MISC_FEATURE: c-term amidation
  MOD_RES (10)..(10): Covalently bound to Trp residue comprising a C18 fatty acid
  MOD_RES (24)..(24): Cys-PEG
HSQGTFTSDKSKYLDERRAKDFVCWLMNT

SEQ ID NO: 549 - protein, 29 aa, Artificial Sequence
  Synthetic peptide
  MISC_FEATURE: Glucagon E16 K20 K10-C16 amide
  MISC_FEATURE: c-term amidation
  MOD_RES (10)..(10): Covalently bound to Glu residue comprising a C16 fatty acid
  MOD_RES (24)..(24): Cys-PEG
HSQGTFTSDKSKYLDERRAQDFVCWLMNT

SEQ ID NO: 550 - protein, 28 aa, Artificial Sequence
  Synthetic peptide
  MISC_FEATURE: Chimera 2 truncated by one amino acid
HSQGTFTSDYSKYLDEQAAKEFIAWLMN

SEQ ID NO: 551 - protein, 27 aa, Artificial Sequence
  Synthetic peptide
  MISC_FEATURE: Chimera 2 truncated by two amino acids
HSQGTFTSDYSKYLDEQAAKEFIAWLM

SEQ ID NO: 552 - protein, 28 aa, Artificial Sequence
  Synthetic peptide
  MISC_FEATURE: aa 1-28, E16 K20 C-terminal amide
  MISC_FEATURE: c-term amidation
HSQGTFTSDYSKYLDERRAKDFVQWLMN

SEQ ID NO: 553 - protein, 27 aa, Artificial Sequence
  Synthetic peptide
  MISC_FEATURE: aa 1-27 E16 K20 C-terminal amide
  MISC_FEATURE: c-term amidation
HSQGTFTSDYSKYLDERRAKDFVQWKM

SEQ ID NO: 554 - protein, 29 aa, Artificial Sequence
  Synthetic peptide
  MISC_FEATURE: c-term amidation
  MOD_RES (27)..(27): Norleucine
HSEGTFTSDYSKYLDEQAAKEFIAWLXNT

SEQ ID NO: 555 - protein, 39 aa, Artificial Sequence
  Synthetic peptide
  MISC_FEATURE (16)..(20): Lactam bridging side chains at positions 16 and 20
YSQGTFTSDYSKYLDEQAAKEFVNWLMNGGPSSGAPPPS

SEQ ID NO: 556 - protein, 29 aa, Artificial Sequence
  Synthetic peptide
  MISC_FEATURE: Chimera 2 with AIB at 16
  MISC_FEATURE: c-term amidation
  MOD_RES (16)..(16): Aminoisobutyric acid
HSQGTFTSDYSKYLDXQAAKEFIAWLMNT

SEQ ID NO: 557 - protein, 29 aa, Artificial Sequence
  Synthetic peptide
  MISC_FEATURE: c-term amidation
  MOD_RES (2)..(2): Aminoisobutyric acid
  MOD_RES (16)..(16): Aminoisobutyric acid
HXQGTFTSDYSKYLDXRRAQDFVQWLMNT

SEQ ID NO: 558 - protein, 29 aa, Artificial Sequence
  Synthetic peptide
  MISC_FEATURE: c-term amidation
  MOD_RES (2)..(2): Aminoisobutyric acid
  MISC_FEATURE (10)..(10): Covalently bound to Trp residue comprising a C16 fatty acid
  MOD_RES (16)..(16): Aminoisobutyric acid
  MOD_RES (24)..(24): Cys-PEG
HXQGTFTSDKSKYLDXRRAQDFVCWLMNT

SEQ ID NO: 559 - protein, 29 aa, Artificial Sequence
  Synthetic peptide
  MISC_FEATURE: c-term amidation
  MOD_RES (2)..(2): Aminoisobutric Acid
  MISC_FEATURE (10)..(10): Covalently bound to Trp residue comprising a C16 fatty acid
  MOD_RES (16)..(16): Aminoisobutric Acid
HXQGTFTSDKSKYLDXRRAQDFVCWLMNT

SEQ ID NO: 560 - protein, 29 aa, Artificial Sequence
  Synthetic peptide
  MISC_FEATURE: c-term amidation
  MOD_RES (2)..(2): Aminoisobutyric acid
  MISC_FEATURE (10)..(10): Covalently bound to Trp residue comprising a C16 fatty acid
  MOD_RES (16)..(16): Aminoisobutyric acid
  MOD_RES (20)..(20): Aminoisobutyric acid
  MOD_RES (24)..(24): Cys-PEG
HXQGTFTSDKSKYLDXRRAXDFVCWLMNT

SEQ ID NO: 561 - protein, 29 aa, Artificial Sequence
  Synthetic peptide
  MISC_FEATURE: c-term amidation
  MOD_RES (2)..(2): Aminoisobutyric acid
  MISC_FEATURE (10)..(10): Covalently bound to Trp residue comprising a C16 fatty acid
  MOD_RES (16)..(16): Aminoisobutyric acid
  MOD_RES (20)..(20): Aminoisobutyric acid
HXQGTFTSDKSKYLDXRRAXDFVCWLMNT

SEQ ID NO: 562 - protein, 29 aa, Artificial Sequence
  Synthetic peptide
  MISC_FEATURE: c-term amidation
  MOD_RES (2)..(2): Aminoisobutyric acid
  MOD_RES (16)..(16): Aminoisobutyric acid
HXQGTFTSDKSKYLDXRRAQDFVQWLMNT

SEQ ID NO: 563 - protein, 29 aa, Artificial Sequence
  Synthetic peptide
  MISC_FEATURE: c-term amidation
  MOD_RES (2)..(2): Aminoisobutyric Acid
  MOD_RES (10)..(10): Acylated with a C16 fatty acyl group
  MOD_RES (16)..(16): Aminoisobutyric Acid
HXQGTFTSDKSKYLDXRRAQDFVQWLMNT

SEQ ID NO: 564 - protein, 29 aa, Artificial Sequence
  Synthetic peptide
  MISC_FEATURE: c-term amidation
  MOD_RES (2)..(2): Aminoisobutyric Acid
  MOD_RES (10)..(10): Acylated with a C16 fatty acyl group via Ala-Ala spacer
  MOD_RES (16)..(16): Aminoisobutyric Acid
HXQGTFTSDKSKYLDXRRAQDFVQWLMNT

SEQ ID NO: 565 - protein, 29 aa, Artificial Sequence
  Synthetic peptide
  MISC_FEATURE: c-term amidation
  MOD_RES (2)..(2): Aminoisobutryic Acid
  MOD_RES (10)..(10): Acylated with a C16 fatty acyl group via gamma-Glu-gamma-Glu spacer
  MOD_RES (16)..(16): Aminoisobutryic Acid
HXQGTFTSDKSKYLDXRRAQDFVQWLMNT

SEQ ID NO: 566 - protein, 29 aa, Artificial Sequence
  Synthetic peptide
  MISC_FEATURE: c-term amidation
  MOD_RES (2)..(2): Aminoisobutryic Acid
  MOD_RES (10)..(10): Acylated with a C16 fatty acyl group via beta-Ala-beta-Ala spacer
  MOD_RES (16)..(16): Aminoisobutryic Acid
HXQGTFTSDKSKYLDXRRAQDFVQWLMNT

SEQ ID NO: 567 - protein, 29 aa, Artificial Sequence
  Synthetic peptide
  MISC_FEATURE: c-term amidation
  MOD_RES (2)..(2): Aminoisobutryic Acid
  MOD_RES (10)..(10): Acylated with a C16 fatty acyl group via 6-aminohexanoic acid spacer
  MOD_RES (16)..(16): Aminoisobutryic Acid
HXQGTFTSDKSKYLDXRRAQDFVQWLMNT

SEQ ID NO: 568 - protein, 29 aa, Artificial Sequence
  Synthetic peptide
  MISC_FEATURE: c-term amidation
  MOD_RES (2)..(2): Aminoisobutryic Acid
  MOD_RES (10)..(10): Acylated with a C16 fatty acyl group via Leu-Leu spacer
  MOD_RES (16)..(16): Aminoisobutryic Acid
HXQGTFTSDKSKYLDXRRAQDFVQWLMNT

SEQ ID NO: 569 - protein, 29 aa, Artificial Sequence
  Synthetic peptide
  MISC_FEATURE: c-term amidation
  MOD_RES (2)..(2): Aminoisobutryic Acid
  MOD_RES (10)..(10): Acylated with a C16 fatty acyl group via Pro-Pro spacer
  MOD_RES (16)..(16): Aminoisobutryic Acid
HXQGTFTSDKSKYLDXRRAQDFVQWLMNT

SEQ ID NO: 570 - protein, 29 aa, Artificial Sequence
  Synthetic peptide
  MISC_FEATURE: c-term amidation
  MOD_RES (2)..(2): Aminoisobutyric Acid
  MOD_RES (10)..(10): Acylated with a C14 fatty acyl group
  MOD_RES (16)..(16): Aminoisobutyric Acid
  MOD_RES (24)..(24): Pegylated
HXQGTFTSDKSKYLDXRRAQDFVCWLMNT

SEQ ID NO: 571 - protein, 29 aa, Artificial Sequence
  Synthetic peptide
  MISC_FEATURE: c-term amidation
  MOD_RES (2)..(2): Aminoisobutyric Acid
  MOD_RES (10)..(10): Acylated with a C14 fatty acyl group via gamma-Glu-gamma-Glu spacer
  MOD_RES (16)..(16): Aminoisobutyric Acid
  MOD_RES (24)..(24): Pegylated
HXQGTFTSDKSKYLDXRRAQDFVCWLMNT

SEQ ID NO: 572 - protein, 29 aa, Artificial Sequence
  Synthetic peptide
  MISC_FEATURE: c-term amidation
  MOD_RES (2)..(2): Aminoisobutryic Acid
  MOD_RES (10)..(10): Acylated with a C14 fatty acyl group via gamma-Glu-gamma-Glu spacer
  MOD_RES (16)..(16): Aminoisobutryic Acid
HXQGTFTSDKSKYLDXRRAQDFVQWLMNT

SEQ ID NO: 573 - protein, 29 aa, Artificial Sequence
  Synthetic peptide
  MISC_FEATURE: c-term amidation
  MOD_RES (2)..(2): Aminoisobutryic Acid
  MOD_RES (10)..(10): Acylated with a C14 fatty acyl group via Ala-Ala spacer
  MOD_RES (16)..(16): Aminoisobutryic Acid
  MOD_RES (24)..(24): Pegylated
HXQGTFTSDKSKYLDXRRAQDFVCWLMNT

SEQ ID NO: 574 - protein, 29 aa, Artificial Sequence
  Synthetic peptide
  MISC_FEATURE: c-term amidation
  MOD_RES (2)..(2): Aminoisobutryic Acid
  MOD_RES (10)..(10): Acylated with a C14 fatty acyl group via Ala-Ala spacer
  MOD_RES (16)..(16): Aminoisobutryic Acid
HXQGTFTSDKSKYLDXRRAQDFVQWLMNT

SEQ ID NO: 575 - protein, 29 aa, Artificial Sequence
  Synthetic peptide
  MISC_FEATURE: c-term amidation
  MOD_RES (2)..(2): Aminoisobutryic acid
  MOD_RES (10)..(10): Acylated with a C16 fatty acyl group via Ala-Ala spacer
  MOD_RES (16)..(16): Aminoisobutryic acid
  MOD_RES (24)..(24): Pegylated
HXQGTFTSDKSKYLDXRRAQDFVCWLMNT

SEQ ID NO: 576 - protein, 29 aa, Artificial Sequence
  Synthetic peptide
  MISC_FEATURE: c-term amidation
  MOD_RES (2)..(2): Aminoisobutryic Acid
  MOD_RES (10)..(10): Acylated with a C16 fatty acyl group via gamma-Glu-gamma-Glu spacer
  MOD_RES (16)..(16): Aminoisobutryic Acid
  MOD_RES (24)..(24): Pegylated
HXQGTFTSDKSKYLDXRRAQDFVCWLMNT

SEQ ID NO: 577 - protein, 29 aa, Artificial Sequence
  Synthetic peptide
  MISC_FEATURE: c-term amidation
  MOD_RES (10)..(10): Acylated with a C16 fatty acyl group
HSQGTFTSDKSKYLDSRRAQDFVQWLMNT

SEQ ID NO: 578 - protein, 29 aa, Artificial Sequence
  Synthetic peptide
  MISC_FEATURE: c-term amidation
  MOD_RES (10)..(10): Acylated with a C16 fatty acyl group via gamma-Glu-gamma-Glu spacer
HSQGTFTSDKSKYLDSRRAQDFVQWLMNT

SEQ ID NO: 579 - protein, 29 aa, Artificial Sequence
  Synthetic peptide
  MISC_FEATURE: AA-C16 Glucagon Amide
  MISC_FEATURE: c-term amidation
  MOD_RES (10)..(10): Acylated with a C16 fatty acyl group via Ala-Ala spacer
HSQGTFTSDKSKYLDSRRAQDFVQWLMNT

SEQ ID NO: 580 - protein, 29 aa, Artificial Sequence
  Synthetic peptide
  MISC_FEATURE: Chimera 2, AIB2, Lys10, Cys24-PEG
  MISC_FEATURE: c-term amidation
  MOD_RES (2)..(2): Aminoisobutryic Acid
  MOD_RES (24)..(24): Pegylated
HXQGTFTSDKSKYLDEQAAKEFICWLMNT

SEQ ID NO: 581 - protein, 30 aa, Artificial Sequence
  Synthetic peptide
  MISC_FEATURE: Peptide dS2E16K20K30-C14 Gluc Amide
  MISC_FEATURE: c-term amidation
  MOD_RES (2)..(2): Xaa is d-Ser
  MOD_RES (30)..(30): Acylated with a C14 fatty acyl group
HXQGTFTSDYSKYLDERRAKDFVQWLMNTK

SEQ ID NO: 582 - protein, 29 aa, Artificial Sequence
  Synthetic peptide
  MISC_FEATURE: Peptide dS2K10(C14)E16K20-Gluc Amide
  MISC_FEATURE: c-term amidation
  MOD_RES (2)..(2): Xaa is d-Ser
  MOD_RES (10)..(10): Acylated with a C14 fatty acyl group
HXQGTFTSDKSKYLDERRAKDFVQWLMNT

SEQ ID NO: 583 - protein, 30 aa, Artificial Sequence; identical to SEQ ID NO: 581
  Synthetic peptide
  MISC_FEATURE: Peptide dS2E16K20K30-C16 Gluc Amide
  MISC_FEATURE: c-term amidation
  MOD_RES (2)..(2): Xaa is d-Ser
  MOD_RES (30)..(30): Acylated with a C16 fatty acyl group

SEQ ID NO: 584 - protein, 29 aa, Artificial Sequence
  Synthetic peptide
  MISC_FEATURE: Peptide dS2K10(C16)E16K20-Gluc Amide
  MISC_FEATURE: c-term amidation
  MOD_RES (2)..(2): Xaa is d-Ser
  MOD_RES (10)..(10): Acylated with a C16 fatty acyl group
HXQGTFTSDKSKYLDERRAKDFVQWLMNT

SEQ ID NO: 585 - protein, 29 aa, Artificial Sequence
  Synthetic peptide
  MISC_FEATURE: Peptide Chimera 2-AIB2-K10-acylated
  MISC_FEATURE: c-term amidation
  MOD_RES (2)..(2): Aminoisobutryic Acid
  MOD_RES (10)..(10): Acylated with a C18 fatty acyl group
  MOD_RES (24)..(24): Pegylated
HXQGTFTSDKSKYLDEQAAKEFICWLMNT

SEQ ID NO: 586 - protein, 30 aa, Artificial Sequence
  Synthetic peptide
  MISC_FEATURE: Peptide Chimera 2-AIB2-K30-acylated
  MISC_FEATURE: c-term amidation
  MOD_RES (2)..(2): Aminoisobutryic Acid
  MOD_RES (24)..(24): Pegylated
  MOD_RES (30)..(30): Acylated with a C18 fatty acyl group
HXQGTFTSDYSKYLDEQAAKEFICWLMNTK

SEQ ID NO: 587 - protein, 29 aa, Artificial Sequence
  Synthetic peptide
  MISC_FEATURE: c-term amidation
  MOD_RES (1)..(1): DMIA
XSQGTFTSDYSKYLDERRAKDFVCWLMNT

SEQ ID NO: 588 - protein, 29 aa, Artificial Sequence
  Synthetic peptide
  MISC_FEATURE: c-term amidation
  MOD_RES (1)..(1): DMIA
  MOD_RES (16)..(20): Lactam ring between side chains of amino acids at positions 16 and 20
XSQGTFTSDYSKYLDERRAKDFVCWLMNT

SEQ ID NO: 589 - protein, 29 aa, Artificial Sequence
  Synthetic peptide
  MISC_FEATURE: c-term amidation
  MOD_RES (2)..(2): Aminoisobutryic Acid
HXEGTFTSDYSKYLDEQAAKEFICWLMNT

SEQ ID NO: 590 - protein, 29 aa, Artificial Sequence
  Synthetic peptide
  MISC_FEATURE: c-term amidation
  MOD_RES (2)..(2): Aminoisobutryic Acid
  MOD_RES (24)..(24): Pegylated
HXEGTFTSDYSKYLDEQAAKEFICWLMNT

SEQ ID NO: 591 - protein, 29 aa, Artificial Sequence
  Synthetic peptide
  MOD_RES (3)..(3): Xaa is a Glutamine analog
  MOD_RES (27)..(27): Xaa is Norleucine
HSXGTFTSDYSKYLDTRRAAEFVAWLXDE

SEQ ID NO: 592 - protein, 29 aa, Artificial Sequence
  Synthetic peptide
  MOD_RES (3)..(3): Xaa is a Glutamine analog
  MOD_RES (16)..(16): Xaa is Aib
HSXGTFTSDYSKYLDXRRAADFVAWLMDE

SEQ ID NO: 593 - protein, 29 aa, Artificial Sequence
  Synthetic peptide
  MOD_RES (27)..(27): Xaa is Norleucine
HSQGTFTSDYSKYLDTRRAAEFVAWLXDE

SEQ ID NO: 594 - protein, 29 aa, Artificial Sequence
  Synthetic peptide
  MOD_RES (3)..(3): Xaa is Acetamidomethyl-cysteine
  MOD_RES (27)..(27): Xaa is Norleucine
HSXGTFTSDYSKYLDTRRAAEFVAWLXDE

SEQ ID NO: 595 - protein, 29 aa, Artificial Sequence
  Synthetic peptide
  MOD_RES (3)..(3): Xaa is Acetyldiaminobutanoic acid
  MOD_RES (27)..(27): Xaa is Norleucine
HSXGTFTSDYSKYLDTRRAAEFVAWLXDE

SEQ ID NO: 596 - protein, 29 aa, Artificial Sequence
  Synthetic peptide
  MOD_RES (3)..(3): Xaa is carbamoyldiaminopropanoic acid
  MOD_RES (27)..(27): Xaa is Norleucine
HSXGTFTSDYSKYLDTRRAAEFVAWLXDE

SEQ ID NO: 597 - protein, 29 aa, Artificial Sequence
  Synthetic peptide
  MOD_RES (3)..(3): Xaa is Methylglutamine
  MOD_RES (27)..(27): Xaa is Norleucine
HSXGTFTSDYSKYLDTRRAAEFVAWLXDE

SEQ ID NO: 598 - protein, 29 aa, Artificial Sequence
  Synthetic peptide
  MOD_RES (3)..(3): Xaa is Methionine sulfoxide
  MOD_RES (27)..(27): Xaa is Norleucine
HSXGTFTSDYSKYLDTRRAAEFVAWLXDE

SEQ ID NO: 599 - protein, 29 aa, Artificial Sequence
  Synthetic peptide
  MOD_RES (3)..(3): Acetylornithine
  MOD_RES (27)..(27): Xaa is Norleucine
HSXGTFTSDYSKYLDTRRAAEFVAWLXDE

SEQ ID NO: 600 - protein, 29 aa, Artificial Sequence
  Synthetic peptide
  MOD_RES (16)..(16): Xaa is Aminoisobutryic Acid
HSQGTFTSDYSKYLDXRRAADFVAWLMDE

SEQ ID NO: 601 - protein, 29 aa, Artificial Sequence
  Synthetic peptide
  MOD_RES (3)..(3): Xaa is Acetyldiaminobutanoic acid
  MOD_RES (16)..(16): Xaa is Aminoisobutyric Acid
HSXGTFTSDYSKYLDXRRAADFVAWLMDE

SEQ ID NO: 602 - protein, 29 aa, Artificial Sequence
  Synthetic peptide
  MOD_RES (3)..(3): Xaa is Methylglutamine
  MOD_RES (16)..(16): Xaa is Aminoisobutyric Acid
HSXGTFTSDYSKYLDXRRAADFVAWLMDE

SEQ ID NO: 603 - protein, 29 aa, Artificial Sequence
  Synthetic peptide
  MOD_RES (3)..(3): Xaa is Acetyldiaminobutanoic acid
  MOD_RES (16)..(16): Xaa is Aminoisobutryic Acid
HSXGTFTSDYSKYLDXRRAADFVAWLLDE

SEQ ID NO: 604 - protein, 39 aa, Artificial Sequence
  Synthetic peptide
  MISC_FEATURE: c-term amidation
  MOD_RES (3)..(3): Xaa is Acetyldiaminobutanoic acid
  MOD_RES (16)..(16): Xaa is Aminoisobutyric Acid
HSXGTFTSDYSKYLDXRRAADFVAWLLDTGPSSGAPPPS

SEQ ID NO: 605 - protein, 29 aa, Artificial Sequence
  Synthetic peptide
  MOD_RES (3)..(3): Xaa is Acetyldiaminobutanoic acid
  MOD_RES (16)..(16): Xaa is Aminoisobutryic Acid
HSXGTFTSDYSKYLDXRRASDFVSWLLDE

SEQ ID NO: 606 - protein, 29 aa, Artificial Sequence
  Synthetic peptide
  MOD_RES (3)..(3): Xaa is Acetyldiaminobutanoic acid
  MOD_RES (16)..(16): Xaa is Aminoisobutryic Acid
HSXGTFTSDYSKYLDXRRATDFVTWLLDE

SEQ ID NO: 607 - protein, 29 aa, Artificial Sequence
  Synthetic peptide
  MISC_FEATURE: c-term amidation
  MOD_RES (1)..(1): Xaa is Dmia
  MOD_RES (10)..(10): Covalently bound to a C14 fatty acyl group
  MOD_RES (16)..(20): Lactam ring between side chains of amino acids at positions 16 and 20
XSQGTFTSDKSKYLDERRAKDFVQWLMNT

SEQ ID NO: 608 - protein, 29 aa, Artificial Sequence
  Synthetic peptide
  MISC_FEATURE: c-term amidation
  MOD_RES (1)..(1): DMIA
  MOD_RES (10)..(10): Covalently bound to C16 fatty acyl group
  MOD_RES (16)..(20): Lactam ring between side chains of amino acids at positions 16 and 20
XSQGTFTSDKSKYLDERRAKDFVQWLMNT

SEQ ID NO: 609 - protein, 29 aa, Artificial Sequence
  Synthetic peptide
  MISC_FEATURE: c-term amidation
  MOD_RES (1)..(1): DMIA
  MOD_RES (10)..(10): Covalently bound to C18 fatty acyl group
  MOD_RES (16)..(20): Lactam ring between side chains of amino acids at positions 16 and 20
XSQGTFTSDKSKYLDERRAKDFVQWLMNT

SEQ ID NO: 610 - protein, 29 aa, Artificial Sequence
  Synthetic peptide
  MISC_FEATURE: c-term amidation
  MOD_RES (2)..(2): Aminoisobutryic Acid
  MOD_RES (10)..(10): Covalently bound to C14 fatty acyl group
  MOD_RES (16)..(16): Aminoisobutryic Acid
HXQGTFTSDKSKYLDXRRAQDFVQWLMNT

SEQ ID NO: 611 - protein, 29 aa, Artificial Sequence
  Synthetic peptide
  MISC_FEATURE: c-term amidation
  MOD_RES (2)..(2): Aminoisobutryic Acid
  MOD_RES (10)..(10): Covalently bound to C16 fatty acyl group
  MOD_RES (16)..(16): Aminoisobutryic Acid
HXQGTFTSDKSKYLDXRRAQDFVQWLMNT

SEQ ID NO: 612 - protein, 29 aa, Artificial Sequence
  Synthetic peptide
  MISC_FEATURE: c-term amidation
  MOD_RES (2)..(2): Aminoisobutryic Acid
  MOD_RES (10)..(10): Covalently bound to C18 fatty acyl group
  MOD_RES (16)..(16): Aminoisobutryic Acid
HXQGTFTSDKSKYLDXRRAQDFVQWLMNT

SEQ ID NO: 613 - protein, 29 aa, Artificial Sequence
  Synthetic peptide
  MISC_FEATURE: c-term amidation
  MOD_RES (2)..(2): Xaa is d-Ser
  MOD_RES (10)..(10): Covalently bound to C14 fatty acyl group
HXQGTFTSDKSKYLDERRAKDFVQWLMNT

SEQ ID NO: 614 - protein, 29 aa, Artificial Sequence
  Synthetic peptide
  MISC_FEATURE: c-term amidation
  MOD_RES (2)..(2): Xaa is d-Ser
  MOD_RES (10)..(10): Covalently bound to C16 fatty acyl group
HXQGTFTSDKSKYLDERRAKDFVQWLMNT

SEQ ID NO: 615 - protein, 29 aa, Artificial Sequence
  Synthetic peptide
  MISC_FEATURE: c-term amidation
  MOD_RES (2)..(2): Xaa is d-Ser
  MOD_RES (10)..(10): Covalently bound to a C18 fatty acyl group
HXQGTFTSDKSKYLDERRAKDFVQWLMNT

SEQ ID NO: 616 - protein, 29 aa, Artificial Sequence
  Synthetic peptide
  MISC_FEATURE: c-term amidation
  MOD_RES (2)..(2): Aminoisobutyric Acid
  MOD_RES (10)..(10): Covalently bound to a C14 fatty acyl group
  MOD_RES (16)..(16): Aminoisobutyric Acid
HXQGTFTSDKSKYLDXRRAQDFVCWLMNT

SEQ ID NO: 617 - protein, 29 aa, Artificial Sequence
  Synthetic peptide
  MISC_FEATURE: c-term amidation
  MOD_RES (2)..(2): Aminoisobutryic Acid
  MOD_RES (10)..(10): Covalently bound to C14 fatty acyl group via gamma-Glu-gamma-Glu spacer
  MOD_RES (16)..(16): Aminoisobutryic Acid
HXQGTFTSDKSKYLDXRRAQDFVCWLMNT

SEQ ID NO: 618 - protein, 29 aa, Artificial Sequence
  Synthetic peptide
  MISC_FEATURE: c-term amidation
  MOD_RES (2)..(2): Aminoisobutryic Acid
  MOD_RES (10)..(10): Covalently bound to C14 fatty acyl group via Ala-Ala spacer
  MOD_RES (16)..(16): Aminoisobutryic Acid
HXQGTFTSDKSKYLDXRRAQDFVCWLMNT

SEQ ID NO: 619 - protein, 29 aa, Artificial Sequence
  Synthetic peptide
  MISC_FEATURE: c-term amidation
  MOD_RES (2)..(2): Aminoisobutyric Acid
  MOD_RES (10)..(10): Covalently bound to C16 fatty acyl group via di peptide spacer
  MOD_RES (16)..(16): Aminoisobutyric Acid
HXQGTFTSDKSKYLDXRRAQDFVCWLMNT

SEQ ID NO: 620 - protein, 29 aa, Artificial Sequence
  Synthetic peptide
  MISC_FEATURE: c-term amidation
  MOD_RES (2)..(2): Aminoisobutyric Acid
  MOD_RES (10)..(10): Covelently bound to C16 fatty acyl group via Ala-Ala spacer
  MOD_RES (16)..(16): Aminoisobutyric Acid
HXQGTFTSDKSKYLDXRRAQDFVCWLMNT

SEQ ID NO: 621 - protein, 29 aa, Artificial Sequence
  Synthetic peptide
  MISC_FEATURE: c-term amidation
  MOD_RES (2)..(2): Aminoisobutyric Acid
  MOD_RES (10)..(10): Covalently bound to C16 fatty acyl group
  MOD_RES (16)..(16): Aminoisobutyric Acid
HXQGTFTSDKSKYLDXRRAQDFVCWLMNT

SEQ ID NO: 622 - protein, 30 aa, Artificial Sequence
  Synthetic peptide
  MISC_FEATURE: c-term amidation
  MOD_RES (2)..(2): Aminoisobutyric Acid
  MOD_RES (10)..(10): Covalently bound to C16 fatty acyl group
  MOD_RES (16)..(16): Aminoisobutyric Acid
HXQGTFTSDKSKYLDXRRAQDFVCWLMNTK

SEQ ID NO: 623 - protein, 29 aa, Artificial Sequence
  Synthetic peptide
  MISC_FEATURE: beta-Ala-beta-Ala - C16 Glucagon Amide
  MISC_FEATURE: c-term amidation
  MISC_FEATURE (10)..(10): Acylated with a C16 fatty acyl group via beta-Ala-beta-Ala spacer
HSQGTFTSDKSKYLDSRRAQDFVQWLMNT

SEQ ID NO: 624 - protein, 29 aa, Artificial Sequence
  Synthetic peptide
  MISC_FEATURE: Chimera-2 Aib2C24Mal40KPEG
  MOD_RES (2)..(2): Xaa is Aib
  MOD_RES (24)..(24): Covalently bound to 40kDa PEG via thioether made by reaction of peptide with a maleimide-activated PEG
  MOD_RES (29)..(29): AMIDATION
HXQGTFTSDYSKYLDEQAAKEFICWLMNT

SEQ ID NO: 625 - protein, 29 aa, Artificial Sequence
  Synthetic peptide
  MISC_FEATURE: Chimera-2 Aib2E16K20lactamC24Mal40KPEG
  MOD_RES (2)..(2): Xaa is Aib
  MISC_FEATURE (16)..(20): Lactam ring between side chains of the amino acids at positions 16 and 20
  MOD_RES (24)..(24): Covalently bound to 40kDa PEG via thioether made by reaction of peptide with a maleimide-activated PEG
  MOD_RES (29)..(29): AMIDATION
HXQGTFTSDYSKYLDEQAAKEFICWLMNT

SEQ ID NO: 626 - protein, 29 aa, Artificial Sequence
  Synthetic peptide
  MISC_FEATURE: Glucagon Aib2E16K20lactamC24amideMal40KPEG
  MOD_RES (2)..(2): Xaa is Aib
  MISC_FEATURE (16)..(20): Lactam ring between side chains of amino acids at positions 16 and 20
  MOD_RES (24)..(24): Covalently bound to 40kDa PEG via thioether made by reaction of peptide with a maleimide-activated PEG
  MOD_RES (29)..(29): AMIDATION
HXQGTFTSDYSKYLDERRAKDFVCWLMNT

SEQ ID NO: 627 - skipped

SEQ ID NO: 628 - protein, 29 aa, Artificial Sequence
  Synthetic peptide
  MISC_FEATURE: Glucagon Dmia1E16K20lactamC24Mal40KPEG
  MOD_RES (1)..(1): Xaa is Dmia
  MISC_FEATURE (16)..(20): Lactam ring between side chains of amino acids at positions 16 and 20
  MOD_RES (24)..(24): Covalently bound to 40kDa PEG via thioether made by reaction of peptide with a maleimide-activated PEG
  MOD_RES (29)..(29): AMIDATION
XSQGTFTSDYSKYLDERRAKDFVCWLMNT

SEQ ID NO: 629 - protein, 29 aa, Artificial Sequence
  Synthetic peptide
  MISC_FEATURE: Glucagon Dmia1E16K20lactamC24Mal40KPEG
  MOD_RES (1)..(1): Xaa is Dmia
  MISC_FEATURE (16)..(20): Lactam ring between side chains of amino acids at positions 16 and 20
  MISC_FEATURE (24)..(24): Covalently bound to 40kDa PEG via thioether made by reaction of peptide with a maleimide-activated PEG
XSQGTFTSDYSKYLDERRAKDFVCWLMNT

SEQ ID NO: 630 - protein, 29 aa, Artificial Sequence
  Synthetic peptide
  MISC_FEATURE: Glucagon Dmia1E16K20lactamC24thioether40KPEG
  MOD_RES (1)..(1): Xaa is Dmia
  MISC_FEATURE (16)..(20): Lactam ring between side chains of amino acids at position 16 and 20
  MOD_RES (24)..(24): Covalently bound to 40kDa PEG via thioether made by reaction of peptide with haloacetyl-activated PEG
  MOD_RES (29)..(29): AMIDATION
XSQGTFTSDYSKYLDERRAKDFVCWLMNT

SEQ ID NO: 631 - protein, 29 aa, Artificial Sequence
  Synthetic peptide
  MISC_FEATURE: Chimera2 Aib2E3C24-Thioether40K PEG(NOF)
  MOD_RES (2)..(2): Xaa is Aib
  MOD_RES (24)..(24): Covalently bound to 40kDa PEG via thioether made by reaction of peptide with haloacetyl-activated PEG
  MOD_RES (29)..(29): AMIDATION
HXEGTFTSDYSKYLDEQAAKEFICWLMNT

SEQ ID NO: 632 - protein, 29 aa, Artificial Sequence
  Synthetic peptide
  MOD_RES (1)..(1): Xaa is Dmia
  MOD_RES (24)..(24): Covalently bound to 40kDa PEG
  MOD_RES (29)..(29): AMIDATION
XSEGTFTSDYSKYLEERRAKDFVCWLMNT

SEQ ID NO: 633 - protein, 29 aa, Artificial Sequence
  Synthetic peptide
  MISC_FEATURE: Glucagon Aib2Aib16C24K10(rErE-C16) C24PEG40K amide
  MOD_RES (2)..(2): Xaa is Aib
  MOD_RES (10)..(10): Covalently bound to C14 fatty acyl group via gamma-Glu-gamma-Glu spacer
  MOD_RES (16)..(16): Xaa is Aib
  MOD_RES (24)..(24): Covalently bound to 40kDa PEG via thioether made by reaction of peptide with haloacetyl-activated PEG
  MOD_RES (29)..(29): AMIDATION
HXQGTFTSDKSKYLDXRRAQDFVCWLMNT

SEQ ID NO: 634 - protein, 29 aa, Artificial Sequence
  Synthetic peptide
  MISC_FEATURE: Glucagon Aib2Aib16K10(AA-C14)C24PEG40K TE amide
  MOD_RES (2)..(2): Xaa is Aib
  MOD_RES (10)..(10): Covalently bound to C14 fatty acyl group via Ala-Ala spacer
  MOD_RES (16)..(16): Xaa is Aib
  MOD_RES (24)..(24): Covalently bound to 40kDa PEG via thioether made by reaction of peptide with haloacetyl-activated PEG
  MOD_RES (29)..(29): AMIDATION
HXQGTFTSDKSKYLDXRRAQDFVCWLMNT

SEQ ID NO: 635 - protein, 29 aa, Artificial Sequence
  Synthetic peptide
  MISC_FEATURE: Glucagon Aib2Aib16K10(AA-C16) amide
  MOD_RES (2)..(2): Xaa is Aib
  MOD_RES (10)..(10): Covalently bound to C16 fatty acyl group via Ala-Ala spacer
  MOD_RES (16)..(16): Xaa is Aib
  MOD_RES (29)..(29): AMIDATION
HXQGTFTSDKSKYLDXRRAQDFVQWLMNT

SEQ ID NO: 636 - protein, 29 aa, Artificial Sequence
  Synthetic peptide
  MISC_FEATURE: Glucagon Aib2Aib16K10(rErE-C16) amide
  MOD_RES (2)..(2): Xaa is Aib
  MOD_RES (10)..(10): Covalently bound to C16 fatty acyl group via gamma-Glu-gamma-Glu spacer
  MOD_RES (16)..(16): Xaa is Aib
  MOD_RES (29)..(29): AMIDATION
HXQGTFTSDKSKYLDXRRAQDFVQWLMNT

SEQ ID NO: 637 - protein, 29 aa, Artificial Sequence
  Synthetic peptide
  MOD_RES (2)..(2): Xaa is Aib
  MOD_RES (16)..(16): Xaa is Aib
  MOD_RES (29)..(29): AMIDATION
HXQGTFTSDYSKYLDXRRAQDFVQWLMNT

SEQ ID NO: 638 - DNA, 20 bp, Artificial Sequence
  Synthetic primer
caaggtccagggaggttgtg

SEQ ID NO: 639 - DNA, 24 bp, Artificial Sequence
  Synthetic primer
ccaaaggtaagctgtccataagga

SEQ ID NO: 640 - DNA, 22 bp, Artificial Sequence
  Synthetic primer
ctctcccaagagtcacatgtcc

SEQ ID NO: 641 - DNA, 22 bp, Artificial Sequence
  Synthetic primer
caataactcggtcccctacaac

SEQ ID NO: 642 - protein, 29 aa, Artificial Sequence
  Synthetic peptide
HSQGTFTSDYSKYLDSRRAQDFVQWLMDT

SEQ ID NO: 643 - protein, 29 aa, Artificial Sequence
  Synthetic peptide
  MISC_FEATURE: c-term amidation
  MOD_RES (2)..(2): Xaa is d-Ser
  MOD_RES (10)..(10): Acylated with a C16 fatty acyl group via gamma-Glu spacer
HXQGTFTSDKSKYLDEQAAKEFIAWLMNT

SEQ ID NO: 644 - protein, 29 aa, Artificial Sequence
  Synthetic peptide
  MISC_FEATURE: c-term amidation
  MOD_RES (2)..(2): Xaa is d-Ser
  MOD_RES (10)..(10): Acylated with a C16 fatty acyl group via gamma-Glu-gamma-Glu spacer
HXQGTFTSDKSKYLDEQAAKEFIAWLMNT

SEQ ID NO: 645 - protein, 29 aa, Artificial Sequence
  Synthetic peptide
  MISC_FEATURE: c-term amidation
  MOD_RES (2)..(2): Xaa is Aib
  MOD_RES (10)..(10): Acylated with a C16 fatty acyl group via gamma-Glu spacer
HXQGTFTSDKSKYLDEQAAKEFIAWLMNT

SEQ ID NO: 646 - protein, 29 aa, Artificial Sequence
  Synthetic peptide
  MISC_FEATURE: c-term amidation
  MOD_RES (2)..(2): Xaa is Aib
  MOD_RES (10)..(10): Acylated with a C16 fatty acyl group via gamma-Glu-gamma-Glu spacer
HXQGTFTSDKSKYLDEQAAKEFIAWLMNT

SEQ ID NO: 647 - protein, 29 aa, Artificial Sequence
  Synthetic peptide
  MISC_FEATURE: c-term amidation
  MOD_RES (2)..(2): Xaa is Aib
  MOD_RES (10)..(10): Acylated with a C16 fatty acyl group
HXEGTFTSDKSKYLDEQAAKEFIAWLMNT

SEQ ID NO: 648 - protein, 29 aa, Artificial Sequence
  Synthetic peptide
  MISC_FEATURE: c-term amidation
  MOD_RES (2)..(2): Xaa is Aib
  MOD_RES (10)..(10): Acylated with a C16 fatty acyl group via gamma-Glu-gamma-Glu spacer
HXEGTFTSDKSKYLDEQAAKEFIAWLMNT

SEQ ID NO: 649 - protein, 29 aa, Artificial Sequence
  Synthetic peptide
  MISC_FEATURE: c-term amidation
  MOD_RES (2)..(2): Xaa is Aib
  MOD_RES (10)..(10): Acylated with a C16 fatty acyl group via gamma-Glu spacer
HXQGTFISDKSKYLDEQAAKEFIAWLMNT

SEQ ID NO: 650 - protein, 29 aa, Artificial Sequence
  Synthetic peptide
  MISC_FEATURE: c-term amidation
  MOD_RES (2)..(2): Xaa is Aib
  MOD_RES (10)..(10): Acylated with a C16 fatty acyl group via gamma-Glu-gamma-Glu spacer
HXQGTFISDKSKYLDEQAAKEFIAWLMNT

SEQ ID NO: 651 - protein, 29 aa, Artificial Sequence
  Synthetic peptide
  MISC_FEATURE: c-term amidation
  MOD_RES (1)..(1): Xaa is Dmia
  MOD_RES (10)..(10): Acylated with a C16 fatty acyl group via gamma-Glu spacer
  MISC_FEATURE (16)..(20): Lactam ring between side chains of amino acids at positions 16 and 20
XSQGTFTSDKSKYLDERRAKDFVQWLMNT

SEQ ID NO: 652 - protein, 29 aa, Artificial Sequence
  Synthetic peptide
  MISC_FEATURE: c-term amidation
  MOD_RES (1)..(1): Xaa is Dmia
  MOD_RES (10)..(10): Acylated with a C16 fatty acyl group via gamma-Glu-gamma-Glu spacer
  MISC_FEATURE (16)..(20): Lactam ring between side chains of amino acids at positions 16 and 20
XSQGTFTSDKSKYLDERRAKDFVQWLMNT

SEQ ID NO: 653 - protein, 29 aa, Artificial Sequence
  Synthetic peptide
  MISC_FEATURE: c-term amidation
  MOD_RES (1)..(1): Xaa is Dmia
  MISC_FEATURE (16)..(20): Lactam ring between side chains of amino acids at positions 16 and 20
  MOD_RES (29)..(29): Acylated with a C16 fatty acyl group via gamma-Glu spacer
XSQGTFTSDYSKYLDERRAKDFVQWLMNK

SEQ ID NO: 654 - protein, 29 aa, Artificial Sequence
  Synthetic peptide
  MISC_FEATURE: c-term amidation
  MOD_RES (1)..(1): Xaa is Dmia
  MISC_FEATURE (16)..(20): Lactam ring between side chains of amino acids at positions 16 and 20
  MOD_RES (29)..(29): Acylated with a C16 fatty acyl group via gamma-Glu-gamma-Glu spacer
XSQGTFTSDYSKYLDERRAKDFVQWLMNK

SEQ ID NO: 655 - protein, 29 aa, Artificial Sequence
  Synthetic peptide
  MISC_FEATURE: c-term amidation
  MOD_RES (2)..(2): Xaa is Aib
  MOD_RES (10)..(10): Acylated with a C16 fatty acyl group via gamma-Glu-gamma-Glu spacer
  MOD_RES (16)..(16): Xaa is Aib
HXQGTFTSDKSKYLDXRAAQDFVQWLMDT

SEQ ID NO: 656 - protein, 29 aa, Artificial Sequence
  Synthetic peptide
  MISC_FEATURE: c-term amidation
  MOD_RES (2)..(2): Xaa is Aib
  MOD_RES (10)..(10): Acylated with a C16 fatty acyl group via gamma-Glu spacer
  MOD_RES (16)..(16): Xaa is Aib
HXQGTFTSDKSKYLDXRAAQDFVQWLMDT

SEQ ID NO: 657 - protein, 29 aa, Artificial Sequence
  Synthetic peptide
  MISC_FEATURE: c-term amidation
  MOD_RES (2)..(2): Aminoisobutryic Acid
  MOD_RES (10)..(10): Acylated with a C16 fatty acyl group via dipeptide spacer
  MOD_RES (16)..(16): Aminoisobutryic Acid
HXQGTFTSDKSKYLDXRRAQDFVQWLMNT

SEQ ID NO: 658 - protein, 29 aa, Artificial Sequence
  Synthetic peptide
  MISC_FEATURE: c-term amidation
  MOD_RES (2)..(2): Aminoisobutyric Acid
  MOD_RES (10)..(10): Acylated with a C14 fatty acyl group via dipeptide spacer
  MOD_RES (16)..(16): Aminoisobutyric Acid
  MOD_RES (24)..(24): Pegylated
HXQGTFTSDKSKYLDXRRAQDFVCWLMNT

SEQ ID NO: 659 - protein, 29 aa, Artificial Sequence
  Synthetic peptide
  MISC_FEATURE: c-term amidation
  MOD_RES (2)..(2): Aminoisobutryic Acid
  MOD_RES (10)..(10): Acylated with a C14 fatty acyl group via dipeptide spacer
  MOD_RES (16)..(16): Aminoisobutryic Acid
HXQGTFTSDKSKYLDXRRAQDFVQWLMNT

SEQ ID NO: 660 - protein, 29 aa, Artificial Sequence
  Synthetic peptide
  MISC_FEATURE: c-term amidation
  MOD_RES (2)..(2): Aminoisobutryic Acid
  MOD_RES (10)..(10): Acylated with a C16 fatty acyl group via dipeptide spacer
  MOD_RES (16)..(16): Aminoisobutryic Acid
  MOD_RES (24)..(24): Pegylated
HXQGTFTSDKSKYLDXRRAQDFVCWLMNT

SEQ ID NO: 661 - protein, 29 aa, Artificial Sequence
  Synthetic peptide
  MISC_FEATURE: c-term amidation
  MOD_RES (10)..(10): Acylated with a C16 fatty acyl group via dipeptide spacer
HSQGTFTSDKSKYLDSRRAQDFVQWLMNT

SEQ ID NO: 662 - protein, 30 aa, Artificial Sequence; identical to SEQ ID NO: 581
  Synthetic peptide
  MISC_FEATURE: Peptide dS2E16K20K30-C14 Gluc Amide
  MISC_FEATURE: c-term amidation
  MOD_RES (2)..(2): D-serine, D-alanine, valine, amino n-butyric acid, glycine, N-methyl serine, aminoisobutyric acid
  MOD_RES (30)..(30): Acylated with a C14 fatty acyl group

SEQ ID NO: 663 - protein, 29 aa, Artificial Sequence
  Synthetic peptide
  MISC_FEATURE: Peptide dS2K10(C14)E16K20-Gluc Amide
  MISC_FEATURE: c-term amidation
  MOD_RES (2)..(2): D-serine, D-alanine, valine, amino n-butyric acid, glycine, N-methyl serine, aminoisobutyric acid
  MOD_RES (10)..(10): Acylated with a C14 fatty acyl group
HXQGTFTSDKSKYLDERRAKDFVQWLMNT

SEQ ID NO: 664 - protein, 30 aa, Artificial Sequence; identical to SEQ ID NO: 581
  Synthetic peptide
  MISC_FEATURE: Peptide dS2E16K20K30-C16 Gluc Amide
  MISC_FEATURE: c-term amidation
  MOD_RES (2)..(2): D-serine, D-alanine, valine, amino n-butyric acid, glycine, N-methyl serine, aminoisobutyric acid
  MOD_RES (30)..(30): Acylated with a C16 fatty acyl group

SEQ ID NO: 665 - protein, 29 aa, Artificial Sequence
  Synthetic peptide
  MISC_FEATURE: Peptide dS2K10(C16)E16K20-Gluc Amide
  MISC_FEATURE: c-term amidation
  MOD_RES (2)..(2): D-serine, D-alanine, valine, amino n-butyric acid, glycine, N-methyl serine, aminoisobutyric acid
  MOD_RES (10)..(10): Acylated with a C16 fatty acyl group
HXQGTFTSDKSKYLDERRAKDFVQWLMNT

SEQ ID NO: 666 - protein, 29 aa, Artificial Sequence
  Synthetic peptide
  MISC_FEATURE: c-term amidation
  MOD_RES (2)..(2): D-serine, D-alanine, valine, amino n-butyric acid, glycine, N-methyl serine, aminoisobutyric acid
  MOD_RES (10)..(10): Covalently bound to C14 fatty acyl group
HXQGTFTSDKSKYLDERRAKDFVQWLMNT

SEQ ID NO: 667 - protein, 29 aa, Artificial Sequence
  Synthetic peptide
  MISC_FEATURE: c-term amidation
  MOD_RES (2)..(2): D-serine, D-alanine, valine, amino n-butyric acid, glycine, N-methyl serine, aminoisobutyric acid
  MOD_RES (10)..(10): Covalently bound to C16 fatty acyl group
HXQGTFTSDKSKYLDERRAKDFVQWLMNT

SEQ ID NO: 668 - protein, 29 aa, Artificial Sequence
  Synthetic peptide
  MISC_FEATURE: c-term amidation
  MOD_RES (2)..(2): D-serine, D-alanine, valine, amino n-butyric acid, glycine, N-methyl serine, aminoisobutyric acid
  MOD_RES (10)..(10): Covalently bound to a C18 fatty acyl group
HXQGTFTSDKSKYLDERRAKDFVQWLMNT

SEQ ID NO: 669 - protein, 29 aa, Artificial Sequence
  Synthetic peptide
  MISC_FEATURE: c-term amidation
  MOD_RES (2)..(2): Aminoisobutryic Acid
  MOD_RES (10)..(10): Covalently bound to C14 fatty acyl group via dipeptide spacer
  MOD_RES (16)..(16): Aminoisobutryic Acid
HXQGTFTSDKSKYLDXRRAQDFVCWLMNT

SEQ ID NO: 670 - protein, 29 aa, Artificial Sequence
  Synthetic peptide
  MISC_FEATURE: Glucagon Aib2Aib16C24K10(rErE-C16) C24PEG40K amide
  MOD_RES (2)..(2): Xaa is Aib
  MOD_RES (10)..(10): Covalently bound to C14 fatty acyl group via dipeptide spacer
  MOD_RES (16)..(16): Xaa is Aib
  MOD_RES (24)..(24): Covalently bound to 40kDa PEG via thioether made by reaction of peptide with haloacetyl-activated PEG
  MOD_RES (29)..(29): AMIDATION
HXQGTFTSDKSKYLDXRRAQDFVCWLMNT

SEQ ID NO: 671 - protein, 29 aa, Artificial Sequence
  Synthetic peptide
  MISC_FEATURE: Glucagon Aib2Aib16K10(rErE-C16) amide
  MOD_RES (2)..(2): Xaa is Aib
  MOD_RES (10)..(10): Covalently bound to C16 fatty acyl group via dipeptide spacer
  MOD_RES (16)..(16): Xaa is Aib
  MOD_RES (29)..(29): AMIDATION
HXQGTFTSDKSKYLDXRRAQDFVQWLMNT

SEQ ID NO: 672 - protein, 29 aa, Artificial Sequence
  Synthetic peptide
  MISC_FEATURE: c-term amidation
  MOD_RES (2)..(2): D-serine, D-alanine, valine, amino n-butyric acid, glycine, N-methyl serine, aminoisobutyric acid
  MOD_RES (10)..(10): Acylated with a C16 fatty acyl group via acidic amino acid spacer
HXQGTFTSDKSKYLDEQAAKEFIAWLMNT

SEQ ID NO: 673 - protein, 29 aa, Artificial Sequence
  Synthetic peptide
  MISC_FEATURE: c-term amidation
  MOD_RES (2)..(2): D-serine, D-alanine, valine, amino n-butyric acid, glycine, N-methyl serine, aminoisobutyric acid
  MOD_RES (10)..(10): Acylated with a C16 fatty acyl group via dipeptide spacer
HXQGTFTSDKSKYLDEQAAKEFIAWLMNT

SEQ ID NO: 674 - protein, 29 aa, Artificial Sequence
  Synthetic peptide
  MISC_FEATURE: c-term amidation
  MOD_RES (2)..(2): Xaa is Aib
  MOD_RES (10)..(10): Acylated with a C16 fatty acyl group via acidic amino acid spacer
HXQGTFTSDKSKYLDEQAAKEFIAWLMNT

SEQ ID NO: 675 - protein, 29 aa, Artificial Sequence
  Synthetic peptide
  MISC_FEATURE: c-term amidation
  MOD_RES (2)..(2): Xaa is Aib
  MOD_RES (10)..(10): Acylated with a C16 fatty acyl group via dipeptide spacer
HXQGTFTSDKSKYLDEQAAKEFIAWLMNT

SEQ ID NO: 676 - protein, 29 aa, Artificial Sequence
  Synthetic peptide
  MISC_FEATURE: c-term amidation
  MOD_RES (2)..(2): Xaa is Aib
  MOD_RES (10)..(10): Acylated with a C16 fatty acyl group via dipeptide spacer
HXEGTFTSDKSKYLDEQAAKEFIAWLMNT

SEQ ID NO: 677 - protein, 29 aa, Artificial Sequence
  Synthetic peptide
  MISC_FEATURE: c-term amidation
  MOD_RES (2)..(2): Xaa is Aib
  MOD_RES (10)..(10): Acylated with a C16 fatty acyl group via acidic amino acid spacer
HXQGTFISDKSKYLDEQAAKEFIAWLMNT

SEQ ID NO: 678 - protein, 29 aa, Artificial Sequence
  Synthetic peptide
  MISC_FEATURE: c-term amidation
  MOD_RES (2)..(2): Xaa is Aib
  MOD_RES (10)..(10): Acylated with a C16 fatty acyl group via dipeptide spacer
HXQGTFISDKSKYLDEQAAKEFIAWLMNT

SEQ ID NO: 679 - protein, 29 aa, Artificial Sequence
  Synthetic peptide
  MISC_FEATURE: c-term amidation
  MOD_RES (1)..(1): Xaa is Dmia
  MOD_RES (10)..(10): Acylated with a C16 fatty acyl group via acidic amino acid spacer
  MISC_FEATURE (16)..(20): Lactam ring between side chains of amino acids at positions 16 and 20
XSQGTFTSDKSKYLDERRAKDFVQWLMNT

SEQ ID NO: 680 - protein, 29 aa, Artificial Sequence
  Synthetic peptide
  MISC_FEATURE: c-term amidation
  MOD_RES (1)..(1): Xaa is Dmia
  MOD_RES (10)..(10): Acylated with a C16 fatty acyl group via dipeptide spacer
  MISC_FEATURE (16)..(20): Lactam ring between side chains of amino acids at positions 16 and 20
XSQGTFTSDKSKYLDERRAKDFVQWLMNT

SEQ ID NO: 681 - protein, 29 aa, Artificial Sequence
  Synthetic peptide
  MISC_FEATURE: c-term amidation
  MOD_RES (1)..(1): Xaa is Dmia
  MISC_FEATURE (16)..(20): Lactam ring between side chains of amino acids at positions 16 and 20
  MOD_RES (29)..(29): Acylated with a C16 fatty acyl group via acidic amino acid spacer
XSQGTFTSDYSKYLDERRAKDFVQWLMNK

SEQ ID NO: 682 - protein, 29 aa, Artificial Sequence
  Synthetic peptide
  MISC_FEATURE: c-term amidation
  MOD_RES (1)..(1): Xaa is Dmia
  MISC_FEATURE (16)..(20): Lactam ring between side chains of amino acids at positions 16 and 20
  MOD_RES (29)..(29): Acylated with a C16 fatty acyl group via dipeptide spacer
XSQGTFTSDYSKYLDERRAKDFVQWLMNK

SEQ ID NO: 683 - protein, 29 aa, Artificial Sequence
  Synthetic peptide
  MISC_FEATURE: c-term amidation
  MOD_RES (2)..(2): Xaa is Aib
  MOD_RES (10)..(10): Acylated with a C16 fatty acyl group via dipeptide spacer
  MOD_RES (16)..(16): Xaa is Aib
HXQGTFTSDKSKYLDXRAAQDFVQWLMDT

SEQ ID NO: 684 - protein, 29 aa, Artificial Sequence
  Synthetic peptide
  MISC_FEATURE: c-term amidation
  MOD_RES (2)..(2): Xaa is Aib
  MOD_RES (10)..(10): Acylated with a C16 fatty acyl group via acidic amino acid spacer
  MOD_RES (16)..(16): Xaa is Aib
HXQGTFTSDKSKYLDXRAAQDFVQWLMDT

SEQ ID NO: 685-700 - skipped (16 entries)

SEQ ID NO: 701 - protein, 29 aa, Homo sapiens
  MOD_RES (29)..(29): C-terminal amidation
HSQGTFTSDYSKYLDSRRAQDPVQWLMNT

SEQ ID NO: 702 - protein, 24 aa, Artificial Sequence
  Glucagon analog
  MOD_RES (1)..(1): N-terminal amino group replaced with hydroxy group
FTSDYSKYLDSRRAQDFVQWLMNT

SEQ ID NO: 703 - protein, 31 aa, Homo sapiens; identical to SEQ ID NO: 50

SEQ ID NO: 704 - protein, 30 aa, Homo sapiens; identical to SEQ ID NO: 52
  MOD_RES (30)..(30): AMIDATION

SEQ ID NO: 705 - protein, 28 aa, Homo sapiens
HGEGTFTSDLSKQMEEAVRLFIEWLKNG

SEQ ID NO: 706 - protein, 37 aa, Homo sapiens
HSQGTFTSDYSKYLDSRRAQDFVQWLMDTKRNRNNIA

SEQ ID NO: 707 - protein, 42 aa, Homo sapiens
YAEGTFISDYSIAMDKIHQQDFVNWLLAQKGKKNDWKHNITQ

SEQ ID NO: 708 - protein, 33 aa, Homo sapiens
HADGSFSDEMNTILDNLAARDFINWLIQTKITD

SEQ ID NO: 709 - protein, 49 aa, Homo sapiens
YLYQWLGAPVPYPDPLEPRREVCELNPDCDELADHIGFQEAYRRFYGPV

SEQ ID NO: 710 - protein, 10 aa, Artificial Sequence
  peptide fragment representing the carboxy terminal 10 amino acids of Exendin-4
GPSSGAPPPS

SEQ ID NO: 711 - protein, 10 aa, Artificial Sequence
  peptide fragment representing the carboxy terminal 10 amino acids of Exendin-4
  MOD_RES (10)..(10): AMIDATION
GPSSGAPPPS

SEQ ID NO: 712 - protein, 11 aa, Artificial Sequence
  peptide fragment representing the carboxy terminal 10 amino acids of Exendin-4
  MOD_RES (11)..(11): Pegylation
GPSSGAPPPSC

SEQ ID NO: 713 - protein, 13 aa, Artificial Sequence
  peptide fragment representing the carboxy terminal 13 amino acids of GIP peptide
KGKKNDWKHNITQ

SEQ ID NO: 714 - protein, 8 aa, Artificial Sequence
  peptide fragment representing the carboxy terminal 8 amino acids of oxyntomodulin
KRNRNNIA

SEQ ID NO: 715 - protein, 6 aa, Artificial Sequence
  Glucagon analogue
  MOD_RES (6)..(6): C-terminal amide
HTRGTF

SEQ ID NO: 716 - protein, 6 aa, Artificial Sequence
  glucagon analogue
  MOD_RES (1)..(1): d-histidine
  MOD_RES (2)..(2): d-threonine
  MOD_RES (3)..(3): d-arginine
  MOD_RES (5)..(5): d-threonine
  MOD_RES (6)..(6): d-phenylalanine
  MOD_RES (6)..(6): C-terminal amidation
XXXGXX

SEQ ID NO: 717 - protein, 30 aa, Artificial Sequence
  glucagon analogue
  MOD_RES (24)..(24): pegylation
HAEGTFTSDVSSYLEGQAAKEFICWLVKGR

SEQ ID NO: 718 - protein, 39 aa, Heloderma suspectum
HGEGTFTSDLSKQMEEEAVRLFIEWLKNGGPSSGAPPPS

SEQ ID NO: 719 - protein, 29 aa, Homo sapiens
YADAIFTNSYRKVLGQLSARKLLQDIMSR

SEQ ID NO: 720 - protein, 28 aa, Homo sapiens
  MOD_RES (28)..(28): AMIDATION
HSDAVFTDNYTRLRKQMAVKKYLNSILN

SEQ ID NO: 721 - protein, 27 aa, Homo sapiens
HSDGIFTDSYSRYRKQMAVKKYLAAVL

SEQ ID NO: 722 - protein, 27 aa, Homo sapiens
  MOD_RES (27)..(27): AMIDATION
HADGVFTSDFSKLLGQLSAKKYLESLM

SEQ ID NO: 723 - protein, 27 aa, Homo sapiens
  MOD_RES (27)..(27): AMIDATION
HSDGTFTSELSRLREGARLQRLLQGLV

SEQ ID NO: 724 - protein, 30 aa, Artificial Sequence
  Synthetic peptide
  MOD_RES (2)..(2): Xaa is AIB
  MOD_RES (24)..(24): Cys residue linked to 40kDa PEG via maleimide
  MOD_RES (30)..(30): C-terminal amidation
HXQGTFTSDYSKYLDEQAAKEFICWLMNTN

SEQ ID NO: 725 - protein, 29 aa, Artificial Sequence
  Synthetic peptide
  MOD_RES (2)..(2): Xaa is AIB
  MISC_FEATURE (24)..(24): Covalently bound to 40K PEG via thioether
  MOD_RES (29)..(29): AMIDATION
HXEGTFTSDYSKYLDEQAAKEFICWLMNT

SEQ ID NO: 726 - protein, 31 aa, Artificial Sequence
  Synthetic peptide
  MOD_RES (1)..(1): d-lysine
  MOD_RES (2)..(2): Sarcosine (N-methyl glycine)
  MOD_RES (4)..(4): Xaa is AIB
  MOD_RES (24)..(24): Covalently bound to 40kDa PEG via thioether
  MOD_RES (31)..(31): AMIDATION
KGHXEGTFTSDYSKYLDEQAAKEFICWLMNT

SEQ ID NO: 727 - protein, 31 aa, Artificial Sequence; identical to SEQ ID NO: 726
  Synthetic peptide
  MOD_RES (1)..(1): d-lysine
  MOD_RES (2)..(2): N-hexyl-glycine
  MOD_RES (4)..(4): Xaa is AIB
  MOD_RES (24)..(24): Covalently bound to 40kDa PEG via maleimide
  MOD_RES (31)..(31): AMIDATION

SEQ ID NO: 728 - protein, 31 aa, Artificial Sequence
  Synthetic peptide
  MOD_RES (1)..(1): d-lysine
  MOD_RES (2)..(2): N-methyl phenylalanine
  MOD_RES (4)..(4): Xaa is AIB
  MOD_RES (24)..(24): Covalently bound to 40kDa PEG via thioether
  MOD_RES (31)..(31): AMIDATION
KFHXEGTFTSDYSKYLDEQAAKEFICWLMNT

SEQ ID NO: 729 - protein, 29 aa, Artificial Sequence
  Synthetic peptide
  MOD_RES (2)..(2): Xaa is AIB
  MOD_RES (24)..(24): Covalently bound to 40 kDa PEG via maleimide
HXEGTFTSDYSKYLDEQAAKEFICWLMNT

SEQ ID NO: 730 - protein, 29 aa, Artificial Sequence
  Synthetic peptide
  MOD_RES (1)..(1): Xaa is DMIA
  MISC_FEATURE (16)..(20): Lactam ring between side chains of amino acids
  MOD_RES (24)..(24): Covalently bound to 40kDa PEG via maleimide
  MOD_RES (29)..(29): C-terminal amidation
XSQGTFTSDKSKYLDERRAKDFVCWLMNT

SEQ ID NO: 731 - protein, 30 aa, Artificial Sequence
  Synthetic peptide
  MOD_RES (30)..(30): C-terminal amidation
HSQGTFTSDYSKYLDEQAAKEFIAWLMNTN

SEQ ID NO: 732 - protein, 8 aa, Artificial Sequence
  Synthetic peptide
  MOD_RES (1)..(1): Xaa is Phe, hydroxyl-Phe, Gly, hydroxyl-Gly, Ala, Cys, Ser, Lys, Glu, dehydro-Val, Pro, d-Pro, AIB, 1-aminocyclohexanecarboxylic acid, 1-aminocyclopropanecarboxylic acid, N-Me-AIB, alpha-alpha-diethyl-Gly, hydroxyl-AIB, or d-Lys
  MOD_RES (2)..(2): Xaa is Pro, d-Pro, N-methyl-Gly, N-hexyl-Gly, Azetidine-2-carboxylic acid, N-methyl-Ala, or N-methyl-Phe
  MOD_RES (3)..(3): Xaa is His, d-His, Ala, or N-methyl-His
  MOD_RES (8)..(8): C-terminal amidation
XXXSRGTF

SEQ ID NO: 733 - protein, 31 aa, Artificial Sequence
  Synthetic peptide
  MOD_RES (1)..(1): d-Lys
  MOD_RES (2)..(2): Xaa is Sar
  MOD_RES (4)..(4): Xaa is AIB
  MOD_RES (26)..(26): Covalently bound to PEG via 40kDa maleimide
KXHXEGTFTSDYSKYLDEQAAKEFICWLMNT

SEQ ID NO: 734 - protein, 32 aa, Artificial Sequence
  Synthetic peptide
  MOD_RES (1)..(1): d-Lys
  MOD_RES (2)..(2): Xaa is Sar
  MOD_RES (4)..(4): Xaa is AIB
  MOD_RES (26)..(26): Cys residue linked to 40kDa PEG via maleimide
  MOD_RES (32)..(32): C-terminal amidation
KXHXQGTFTSDYSKYLDEQAAKEFICWLMNTN

SEQ ID NO: 735 - protein, 31 aa, Artificial Sequence
  Synthetic peptide
  MOD_RES (1)..(1): d-Lys
  MOD_RES (2)..(2): Xaa is Sar
  MOD_RES (3)..(3): Xaa is DMIA
  MISC_FEATURE (18)..(22): Lactam ring between side chains of amino acids
  MOD_RES (26)..(26): Covalently bound to 40kDa PEG via maleimide
  MOD_RES (31)..(31): C-terminal amidation
KXXSQGTFTSDKSKYLDERRAKDFVCWLMNT

SEQ ID NO: 736 - protein, 31 aa, Artificial Sequence; identical to SEQ ID NO: 726
  Synthetic peptide
  MOD_RES (1)..(1): d-Lys
  MOD_RES (2)..(2): N-hexyl-Gly
  MOD_RES (4)..(4): Xaa is AIB
  MISC_FEATURE (26)..(26): Covalently bound to 40K PEG via thioether
  MOD_RES (31)..(31): AMIDATION

SEQ ID NO: 737 - protein, 32 aa, Artificial Sequence
  Synthetic peptide
  MOD_RES (1)..(1): d-Lys
  MOD_RES (2)..(2): N-hexyl-Gly
  MOD_RES (4)..(4): Xaa is AIB
  MOD_RES (26)..(26): Cys residue linked to 40kDa PEG via maleimide
  MOD_RES (32)..(32): C-terminal amidation
KGHXQGTFTSDYSKYLDEQAAKEFICWLMNTN

SEQ ID NO: 738 - protein, 31 aa, Artificial Sequence
  Synthetic peptide
  MOD_RES (1)..(1): d-Lys
  MOD_RES (2)..(2): N-hexyl-Gly
  MOD_RES (3)..(3): Xaa is DMIA
  MISC_FEATURE (18)..(22): Lactam ring between side chains of amino acids
  MOD_RES (26)..(26): Covalently bound to 40kDa PEG via maleimide
  MOD_RES (31)..(31): C-terminal amidation
KGXSQGTFTSDKSKYLDERRAKDFVCWLMNT

SEQ ID NO: 739 - protein, 31 aa, Artificial Sequence; identical to SEQ ID NO: 728
  Synthetic peptide
  MOD_RES (1)..(1): d-Lys
  MOD_RES (2)..(2): N-methyl-Phe
  MOD_RES (4)..(4): Xaa is AIB
  MOD_RES (26)..(26): Covalently bound to 40kDa PEG via maleimide

SEQ ID NO: 740 - protein, 32 aa, Artificial Sequence
  Synthetic peptide
  MOD_RES (1)..(1): d-Lys
  MOD_RES (2)..(2): N-methyl-Phe
  MOD_RES (4)..(4): Xaa is AIB
  MOD_RES (26)..(26): Cys residue linked to 40kDa PEG via maleimide
  MOD_RES (32)..(32): C-terminal amidation
KFHXQGTFTSDYSKYLDEQAAKEFICWLMNTN

SEQ ID NO: 741 - protein, 31 aa, Artificial Sequence
  Synthetic peptide
  MOD_RES (1)..(1): d-Lys
  MOD_RES (2)..(2): N-methyl-Phe
  MOD_RES (3)..(3): Xaa is DMIA
  MISC_FEATURE (18)..(22): Lactam ring between side chains of amino acids
  MOD_RES (26)..(26): Covalently bound to 40kDa PEG via maleimide
  MOD_RES (31)..(31): C-terminal amidation
KFXSQGTFTSDKSKYLDERRAKDFVCWLMNT

SEQ ID NO: 742-800 - skipped (59 entries)

SEQ ID NO: 801 - protein, 29 aa, Homo sapiens
HSQGTFTSDYSKYLDSRRAQDFVQWLMNT

SEQ ID NO: 802 - protein, 29 aa, Artificial Sequence
  Glucagon analogue
  MOD_RES (16)..(16): Xaa is Ser, Cys, Orn, homocysteine or acetyl phenyalanine
  MOD_RES (27)..(27): Xaa is Met, Leu or Nle
HSQGTFTSDYSKYLDXRRAQDFVQWLXDT

SEQ ID NO: 803 - protein, 29 aa, Artificial Sequence
  Glucagon analogue
  MOD_RES (17)..(17): Xaa is Arg, Cys, Orn, homocysteine or acetyl phenyalanine
  MOD_RES (27)..(27): Xaa is Met, Leu or Nle
HSQGTFTSDYSKYLDSXRAQDFVQWLXDT

SEQ ID NO: 804 - protein, 29 aa, Artificial Sequence
  Glucagon analogue
  MOD_RES (21)..(21): Xaa is Asp, Cys, Orn, homocysteine or acetyl phenylalanine
  MOD_RES (27)..(27): Xaa is Met, Leu or Nle
HSQGTFTSDYSKYLDSRRAQXFVQWLXDT

SEQ ID NO: 805 - protein, 29 aa, Artificial Sequence
  Synthetic peptide
  MOD_RES (24)..(24): Xaa is Gln, Cys, Orn, homocysteine or acetyl phenylalanine
  MOD_RES (27)..(27): Xaa is Met, Leu or Nle
HSQGTFTSDYSKYLDSRRAQDFVXWLXDT

SEQ ID NO: 806 - protein, 29 aa, Artificial Sequence
  Glucagon analogue
  MOD_RES (21)..(21): Xaa is Asp, Cys, Orn, homocysteine or acetyl phenyalanine
  MOD_RES (24)..(24): Xaa is Gln, Cys, Orn, homocysteine or acetyl phenyalanine
  MOD_RES (27)..(27): Xaa is Met, Leu or Nle
HSQGTFTSDYSKYLDSRRAQXFVXWLXDT

SEQ ID NO: 807 - protein, 29 aa, Artificial Sequence
  Glucagon analogue
  MOD_RES (27)..(27): Xaa is Met, Leu or Nle
  MOD_RES (28)..(28): Xaa is Lys, Arg, His, Asp, Glu, cysteic acid or homocysteic acid
  MOD_RES (29)..(29): Xaa is Thr, Lys, Arg, His, Asp, Glu, cysteic acid or homocysteic acid
HSQGTFTSDYSKYLDSRRAQDFVQWLXXX

SEQ ID NO: 808 - protein, 29 aa, Artificial Sequence
  Glucagon analogue
  MOD_RES (27)..(27): Xaa is Met, Leu or Nle
  MOD_RES (28)..(28): Xaa is Asp or Glu
  MOD_RES (29)..(29): Xaa is Thr, Asp or Glu
HSQGTFTSDYSKYLDSRRAQDFVQWLXXX

SEQ ID NO: 809 - protein, 29 aa, Artificial Sequence
  Glucagon analogue
  MOD_RES (27)..(27): Xaa is Met, Leu or Nle
  MOD_RES (29)..(29): Xaa is Asp or Glu
HSQGTFTSDYSKYLDSRRAQDFVQWLXNX

SEQ ID NO: 810 - protein, 29 aa, Artificial Sequence
  Synthetic peptide
  MOD_RES (27)..(27): Xaa is Met, Leu or Nle
HSQGTFTSDYSKYLDSRRAQDFVQWLXDT

SEQ ID NO: 811 - protein, 29 aa, Artificial Sequence
  Glucagon analogue
HSQGTFTSDYSKYLDSRRAQDFVQWLMDT

SEQ ID NO: 812 - protein, 29 aa, Artificial Sequence
  Glucagon analogue
  MOD_RES (29)..(29): Xaa is Lys, Arg or His
HSQGTFTSDYSKYLDSRRAQDFVQWLMNX

SEQ ID NO: 813 - protein, 29 aa, Artificial Sequence
  Glucagon analogue
HSQGTFTSDYSKYLESRRAQDFVQWLMDT

SEQ ID NO: 814 - protein, 29 aa, Artificial Sequence
  Synthetic peptide
  MOD_RES (16)..(16): Pegylation
  MOD_RES (27)..(27): Xaa is Met, Leu or Nle
HSQGTFTSDYSKYLDCRRAQDFVQWLXDT

SEQ ID NO: 815 - protein, 29 aa, Artificial Sequence
  Glucagon analogue
  MOD_RES (17)..(17): Pegylation
  MOD_RES (27)..(27): Xaa is Met, Leu or Nle
HSQGTFTSDYSKYLDSCRAQDFVQWLXDT

SEQ ID NO: 816 - protein, 29 aa, Artificial Sequence
  Glucagon analogue
  MOD_RES (21)..(21): Pegylation
  MOD_RES (27)..(27): Xaa is Met, Leu or Nle
HSQGTFTSDYSKYLDSRRAQCFVQWLXDT

SEQ ID NO: 817 - protein, 29 aa, Artificial Sequence
  Glucagon analogue
  MOD_RES (24)..(24): Pegylation
  MOD_RES (27)..(27): Xaa is Met, Leu or Nle
HSQGTFTSDYSKYLDSRRAQDFVCWLXDT

SEQ ID NO: 818 - protein, 29 aa, Artificial Sequence
  Glucagon analogue
  MOD_RES (21)..(21): Pegylation
  MOD_RES (27)..(27): Xaa is Met, Leu or Nle
HSQGTFTSDYSRYLDSRRAQKFVQWLXDT

SEQ ID NO: 819 - protein, 29 aa, Artificial Sequence
  Glucagon analogue
  MOD_RES (24)..(24): Pegylation
  MOD_RES (27)..(27): Xaa is Met, Leu or Nle
HSQGTFTSDYSRYLDSRRAQDFVKWLXDT

SEQ ID NO: 820 - protein, 10 aa, Artificial Sequence
  Synthetic peptide
  MISC_FEATURE: Peptide fragment representing carboxy terminal 10 amino acids of Exendin-4
GPSSGAPPPS

SEQ ID NO: 821 - protein, 8 aa, Artificial Sequence
  Synthetic peptide
  MISC_FEATURE: Peptide fragment representing the carboxy terminal 8 amino acids of oxyntomodulin
KRNRNNIA

SEQ ID NO: 822 - protein, 4 aa, Artificial Sequence
  Synthetic peptide
  MISC_FEATURE: Peptide fragment representing the amino 4 amino acids of oxyntomodulin carboxy terminus of SEQ ID NO: 21
KRNR

SEQ ID NO: 823 - protein, 10 aa, Artificial Sequence
  Synthetic peptide
  MISC_FEATURE: Peptide fragment representing the carboxy terminal 10 amino acids of Exendin-4
  MOD_RES (10)..(10): AMIDATION
GPSSGAPPPS

SEQ ID NO: 824 - protein, 39 aa, Artificial Sequence
  Glucagon analogue
HSQGTFTSDYSKYLDSRRAQDFVQWLMDTGPSSGAPPPS

SEQ ID NO: 825 - protein, 37 aa, Artificial Sequence; identical to SEQ ID NO: 706
  Glucagon analogue

SEQ ID NO: 826 - protein, 33 aa, Artificial Sequence
  Glucagon analogue
HSQGTFTSDYSKYLDSRRAQDFVQWLMDTKRNR

SEQ ID NO: 827 - protein, 29 aa, Artificial Sequence
  Glucagon analogue
HSQGTFTSDYSKYLDSCRAQDFVQWLMNT

SEQ ID NO: 828 - protein, 39 aa, Artificial Sequence; identical to SEQ ID NO: 36
  Synthetic peptide

SEQ ID NO: 829 - protein, 29 aa, Artificial Sequence
  Glucagon analogue
  MOD_RES (24)..(24): 2-butyrolactone bound through Cys thiol group
HSQGTFTSDYSKYLDSRRAQDFVQWLMNT

SEQ ID NO: 830 - protein, 29 aa, Artificial Sequence
  Glucagon analogue
  MOD_RES (24)..(24): Carboxymethyl group bound through Cys thiol group
HSQGTFTSDYSKYLDSRRAQDFVQWLMNT

SEQ ID NO: 831 - protein, 39 aa, Artificial Sequence; identical to SEQ ID NO: 36
  Glucagon analogue

SEQ ID NO: 832 - protein, 30 aa, Artificial Sequence
  Glucagon analog
  MOD_RES (30)..(30): Xaa is Asp, Glu, Lys, Arg or His
HSQGTFTSDYSKYLDSRRAQDFVQWLMDTX

SEQ ID NO: 833 - protein, 29 aa, Artificial Sequence
  Glucagon analogue
  MOD_RES (15)..(15): Xaa is Asp, Glu, cysteic acid, homoglutamic acid or homocysteic acid
  MOD_RES (27)..(27): Xaa is Met, Leu or Nle
  MOD_RES (28)..(28): Xaa is Asn, Lys, Arg, His, Asp or Glu
  MOD_RES (29)..(29): Xaa is Thr, Lys, Arg, His, Asp or Glu
HSQGTFTSDYSKYLXSRRAQDFVQWLXXX

SEQ ID NO: 834 - protein, 29 aa, Artificial Sequence
  Glucagon analogue
  MOD_RES (15)..(15): Xaa is Asp, Glu, cysteic acid, homoglutamic acid or homocysteic acid
  MOD_RES (27)..(27): Xaa is Met, Leu or Nle
  MOD_RES (28)..(28): Xaa is Asn or an acidic amino acid
  MOD_RES (29)..(29): Xaa is Thr or an acidic amino acid
HSQGTFTSDYSKYLXSRRAQDFVQWLXXX

SEQ ID NO: 835 - protein, 39 aa, Artificial Sequence
  Synthetic peptide
HSQGTFTSDYSKYLDSRRAQDFVQWLMETGPSSGAPPPS

SEQ ID NO: 836 - protein, 37 aa, Artificial Sequence
  Glucagon analogue
HSQGTFTSDYSKYLDSRRAQDFVQWLMETKRNRNNIA

SEQ ID NO: 837 - protein, 33 aa, Artificial Sequence
  Glucagon analogue
HSQGTFTSDYSKYLDSRRAQDFVQWLMETKRNR

SEQ ID NO: 838 - protein, 29 aa, Artificial Sequence
  Glucagon analogue
HSQGTFTSDYSKYLDSRRAQDFVQWLMET

SEQ ID NO: 839 - protein, 27 aa, Artificial Sequence
  Synthetic peptide
  MOD_RES (1)..(1): Xaa is any amino acid
  MOD_RES (2)..(2): Xaa is any amino acid
  MOD_RES (27)..(27): Met comprises Z
XXQGTFTSDYSKYLDSRRAQDFVQWLM

SEQ ID NO: 840 - protein, 29 aa, Artificial Sequence
  Synthetic peptide
  MOD_RES (1)..(1): Xaa is alpha, alpha-dimethyl imidiazole acetic acid (DMIA)
  MISC_FEATURE (16)..(20): Lactam bridge between residues 16 and 20
  MOD_RES (24)..(24): Pegylation
XSQGTFTSDYSKYLDERRAKDFVCWLMNT

SEQ ID NO: 841 - protein, 29 aa, Artificial Sequence
  Synthetic peptide
  MOD_RES (1)..(1): Xaa is alpha, alpha-dimethyl imidiazole acetic acid (DMIA)
  MISC_FEATURE (16)..(20): Lactam bridge between residues 16 and 20
  MOD_RES (24)..(24): Glutamine to alanine mutation
  MOD_RES (29)..(29): Pegylation
XSQGTFTSDYSKYLDERRAKDFVAWLMNC

SEQ ID NO: 842 - protein, 29 aa, Artificial Sequence
  Synthetic peptide
  MOD_RES (1)..(1): Xaa is alpha, alpha-dimethyl imidiazole acetic acid (DMIA)
  MISC_FEATURE (16)..(20): Lactam bridge between residues 16 and 20
  MOD_RES (24)..(24): Pegylation
  MOD_RES (27)..(27): Xaa is Nle or Leu
XSQGTFTSDYSKYLDERRAKDFVCWLXNT

SEQ ID NO: 843 - protein, 29 aa, Artificial Sequence
  Synthetic peptide
  MOD_RES (1)..(1): Xaa is alpha, alpha-dimethyl imidiazole acetic acid (DMIA)
  MISC_FEATURE (16)..(20): Lactam bridge between residues 16 and 20
  MISC_FEATURE (24)..(24): Glutamine to alanine mutation
  MISC_FEATURE (27)..(27): Xaa is Nle or Leu
  MOD_RES (29)..(29): Pegylation
XSQGTFTSDYSKYLDERRAKDFVAWLXNC

SEQ ID NO: 844 - protein, 29 aa, Artificial Sequence
  Synthetic peptide
  MISC_FEATURE: SEQ ID NO: 1 with  Ala 20, Ala 24, Nle 27, and Asp 28
  MOD_RES (27)..(27): Xaa is Nle
HSQGTFTSDYSKYLDSRRAADFVAWLXDT

SEQ ID NO: 845 - protein, 29 aa, Artificial Sequence
  Synthetic peptide
  MISC_FEATURE: SEQ ID NO: 1 with Ala 20, Ala 24, Nle27 , Asp 28, and Glu 29
  MOD_RES (27)..(27): Xaa is Nle
HSQGTFTSDYSKYLDSRRAADFVAWLXDE

SEQ ID NO: 846 - protein, 30 aa, Artificial Sequence
  Synthetic peptide
  MISC_FEATURE: SEQ ID NO: 1 with Ala 20, Ala 24, Nle 27, Asp 28, and Glu 30
  MOD_RES (27)..(27): Xaa is Nle
HSQGTFTSDYSKYLDSRRAADFVAWLXDTE

SEQ ID NO: 847 - protein, 29 aa, Artificial Sequence
  Synthetic peptide
  MISC_FEATURE: SEQ ID NO: 1 with Ala 20, Ala 24, Nle 27, Glu 28, and Glu 29
  MOD_RES (27)..(27): Xaa is Nle
HSQGTFTSDYSKYLDSRRAADFVAWLXEE

SEQ ID NO: 848 - protein, 30 aa, Artificial Sequence
  Synthetic peptide
  MISC_FEATURE: SEQ ID NO: 1 with Ala 20, Ala 24, Nle 27, Glu 28, and Glu 30
  MOD_RES (27)..(27): Xaa is Nle
HSQGTFTSDYSKYLDSRRAADFVAWLXETE

SEQ ID NO: 849 - protein, 30 aa, Artificial Sequence
  Synthetic peptide
  MOD_RES (27)..(27): Xaa is Nle
  MISC_FEATURE (27)..(27): SEQ ID NO: 1 with Ala 20, Ala 24, Nle 27, Glu 29, and Glu 30
HSQGTFTSDYSKYLDSRRAADFVAWLXNEE

SEQ ID NO: 850 - protein, 29 aa, Artificial Sequence
  Synthetic peptide
  MISC_FEATURE: SEQ ID NO: 1 with Ala 20, Glu 21, Ala 24, Nle 27, and Asp 28
  MOD_RES (27)..(27): Xaa is Nle
HSQGTFTSDYSKYLDSRRAAEFVAWLXDT

SEQ ID NO: 851 - protein, 29 aa, Artificial Sequence
  Synthetic peptide
  MISC_FEATURE: SEQ ID NO: 1 with Ala 20, Glu 21, Ala 24, Nle 27, Asp 28, and Glu 29
  MOD_RES (27)..(27): Xaa is Nle
HSQGTFTSDYSKYLDSRRAAEFVAWLXDE

SEQ ID NO: 852 - protein, 29 aa, Artificial Sequence
  Synthetic peptide
  MISC_FEATURE: SEQ ID NO: 1 with Ala 20, Glu 21, Ala 24, Nle 27, Asp 28, and Glu 30
  MOD_RES (27)..(27): Xaa is Nle
HSQGTFTSDYSKYLDSRRAAEFVAWLXDE

SEQ ID NO: 853 - protein, 29 aa, Artificial Sequence
  Synthetic peptide
  MISC_FEATURE: SEQ ID NO :1 with Ala 20, Glu 21, Ala 24, Nle 27, Glu 28, and Glu 29
  MOD_RES (27)..(27): Xaa is Nle
HSQGTFTSDYSKYLDSRRAAEFVAWLXEE

SEQ ID NO: 854 - protein, 29 aa, Artificial Sequence
  Synthetic peptide
  MISC_FEATURE: SEQ ID NO: 1 with Ala 20, Glu 21, Ala 24, Nle 27, Glu 28, and Glu 30
HSQGTFTSDYSKYLDSRRAQDFVQWLMNT

SEQ ID NO: 855 - protein, 30 aa, Artificial Sequence
  Synthetic peptide
  MISC_FEATURE: SEQ ID NO: 1 with Ala 20, Glu 21, Ala 24, Nle 27, Glu 29, and Glu 30
  MOD_RES (27)..(27): Xaa is Nle
HSQGTFTSDYSKYLDSRRAAEFVAWLXNEE

SEQ ID NO: 856 - protein, 29 aa, Artificial Sequence
  Synthetic peptide
  MISC_FEATURE: SEQ ID NO: 1 with Thr 16, Ala 20, Glu 21, Ala 24, Nle 27, Asp 28, and Glu29
  MOD_RES (27)..(27): Xaa is Nle
HSQGTFTSDYSKYLDTRRAAEFVAWLXDE

SEQ ID NO: 857 - protein, 31 aa, Homo sapiens; identical to SEQ ID NO: 50

SEQ ID NO: 858 - protein, 30 aa, Homo sapiens; identical to SEQ ID NO: 52
  MOD_RES (30)..(30): AMIDATION

SEQ ID NO: 859 - protein, 29 aa, Artificial Sequence
  Synthetic peptide
  MOD_RES (3)..(3): Xaa is Glutamine analog
  MOD_RES (27)..(27): Xaa is Nle
HSXGTFTSDYSKYLDTRRAAEFVAWLXDE

SEQ ID NO: 860 - protein, 29 aa, Artificial Sequence
  Synthetic peptide
  MOD_RES (3)..(3): Xaa is Glutamine analog
  MOD_RES (16)..(16): Xaa is Aminoisobutryic acid
HSXGTFTSDYSKYLDXRRAADFVAWLMDE

SEQ ID NO: 861 - protein, 29 aa, Artificial Sequence
  Synthetic peptide
  MOD_RES (27)..(27): Xaa is Nle
HSQGTFTSDYSKYLDTRRAAEFVAWLXDE

SEQ ID NO: 862 - protein, 29 aa, Artificial Sequence
  Synthetic peptide
  MOD_RES (3)..(3): Xaa is Acetamidomethyl-cysteine
  MOD_RES (27)..(27): Xaa is Nle
HSXGTFTSDYSKYLDTRRAAEFVAWLXDE

SEQ ID NO: 863 - protein, 29 aa, Artificial Sequence
  Synethic peptide
  MOD_RES (3)..(3): Xaa is Acetyldiaminobutanoic acid
  MOD_RES (27)..(27): Xaa is Nle
HSXGTFTSDYSKYLDTRRAAEFVAWLXDE

SEQ ID NO: 864 - protein, 29 aa, Artificial Sequence
  Synthetic peptide
  MOD_RES (3)..(3): Xaa is Carbamoyldiaminopropanoic acid
  MOD_RES (27)..(27): Xaa is Nle
HSXGTFTSDYSKYLDTRRAAEFVAWLXDE

SEQ ID NO: 865 - protein, 29 aa, Artificial Sequence
  Synthetic peptide
  MOD_RES (3)..(3): Xaa is Methylglutamine
  MOD_RES (27)..(27): Xaa is Nle
HSXGTFTSDYSKYLDTRRAAEFVAWLXDE

SEQ ID NO: 866 - protein, 29 aa, Artificial Sequence
  Synthetic peptide
  MOD_RES (3)..(3): Xaa is Methionine sulfoxide
  MOD_RES (27)..(27): Xaa is Nle
HSXGTFTSDYSKYLDTRRAAEFVAWLXDE

SEQ ID NO: 867 - protein, 29 aa, Artificial Sequence
  Synthetic peptide
  MOD_RES (3)..(3): Xaa is Acetylornithine
  MOD_RES (27)..(27): Xaa is Nle
HSXGTFTSDYSKYLDTRRAAEFVAWLXDE

SEQ ID NO: 868 - protein, 29 aa, Artificial Sequence
  Synthetic peptide
  MOD_RES (16)..(16): Xaa is Aminoisobutryic acid
HSQGTFTSDYSKYLDXRRAADFVAWLMDE

SEQ ID NO: 869 - protein, 29 aa, Artificial Sequence
  Synthetic peptide
  MOD_RES (3)..(3): Xaa is Acetyldiaminobutanoic acid
  MOD_RES (16)..(16): Xaa is Aminoisobutryic acid
HSXGTFTSDYSKYLDXRRAADFVAWLMDE

SEQ ID NO: 870 - protein, 29 aa, Artificial Sequence
  Synthetic peptide
  MOD_RES (3)..(3): Xaa is Methylglutamine
  MOD_RES (16)..(16): Xaa is Aib
HSXGTFTSDYSKYLDXRRAADFVAWLMDE

SEQ ID NO: 871 - protein, 29 aa, Artificial Sequence
  Synthetic peptide
  MOD_RES (3)..(3): Xaa is acetyldiaminobutanoic acid
  MOD_RES (16)..(16): Xaa is Aib
HSXGTFTSDYSKYLDXRRAADFVAWLLDE

SEQ ID NO: 872 - protein, 39 aa, Artificial Sequence; identical to SEQ ID NO: 604
  Synthetic peptide
  MOD_RES (3)..(3): Xaa is Acetyldiaminobutanoic acid
  MOD_RES (16)..(16): Aminoisobutryic Acid
  MOD_RES (39)..(39): AMIDATION

SEQ ID NO: 873 - protein, 29 aa, Artificial Sequence
  Synthetic peptide
  MOD_RES (3)..(3): Xaa is Acetyldiaminobutanoic acid
  MOD_RES (16)..(16): Xaa is Aminoisobutryric acid
HSXGTFTSDYSKYLDXRRASDFVSWLLDE

SEQ ID NO: 874 - protein, 29 aa, Artificial Sequence
  Synthetic peptide
  MOD_RES (3)..(3): Xaa is Acetyldiaminobutanoic acid
  MOD_RES (16)..(16): Xaa is Aminoisobutryic acid
HSXGTFTSDYSKYLDXRRATDFVTWLLDE

SEQ ID NO: 875 - protein, 29 aa, Artificial Sequence
  Synthetic peptide
HSQGTFTSDYSKYLDSRRAQDFVQWLMDE

SEQ ID NO: 876 - protein, 29 aa, Artificial Sequence
  Synthetic peptide
  MOD_RES (16)..(16): Xaa is Aib
HSQGTFTSDYSKYLDXRRAQDFVQWLMDE

SEQ ID NO: 877 - protein, 29 aa, Artificial Sequence
  Synthetic peptide
  misc_feature (3)..(3): Xaa can be any naturally occurring amino acid
HSXGTFTSDYSKYLDSRRAQDFVQWLMNT

SEQ ID NO: 878 - protein, 29 aa, Artificial Sequence
  Synthetic peptide
HSQGTFTSDYSKYLDSRRAQDFVQWLMDT

SEQ ID NO: 879 - protein, 30 aa, Artificial Sequence; identical to SEQ ID NO: 581
  Synthetic peptide
  MOD_RES (2)..(2): Xaa is d-Ser
  MOD_RES (30)..(30): Acylated with a C14 fatty acyl group
  MOD_RES (30)..(30): AMIDATION

SEQ ID NO: 880 - protein, 29 aa, Artificial Sequence
  Synthetic peptide
  MOD_RES (2)..(2): Xaa is d-Ser
  MOD_RES (10)..(10): Acylated with a C14 fatty acyl group
  MOD_RES (29)..(29): AMIDATION
HXQGTFTSDKSKYLDERRAKDFVQWLMNT

SEQ ID NO: 881 - protein, 30 aa, Artificial Sequence; identical to SEQ ID NO: 581
  Synthetic peptide
  MOD_RES (2)..(2): Xaa is d-Ser
  MOD_RES (30)..(30): Acylated with a C16 fatty acyl group
  MOD_RES (30)..(30): AMIDATION

SEQ ID NO: 882 - protein, 29 aa, Artificial Sequence
  Synthetic peptide
  MOD_RES (2)..(2): Xaa is d-Ser
  MOD_RES (10)..(10): Acylated with a C16 fatty acyl group
  MOD_RES (29)..(29): AMIDATION
HXQGTFTSDKSKYLDERRAKDFVQWLMNT

SEQ ID NO: 883 - protein, 29 aa, Artificial Sequence
  Synthetic peptide
  MOD_RES (2)..(2): Aminoisobutryic Acid
  MOD_RES (10)..(10): Acylated with a C18 fatty acyl group
  MOD_RES (24)..(24): Cys-PEG
  MOD_RES (29)..(29): AMIDATION
HXQGTFTSDKSKYLDEQAAKEFICWLMNT

SEQ ID NO: 884 - protein, 30 aa, Artificial Sequence; identical to SEQ ID NO: 586
  Synthetic peptide
  MOD_RES (2)..(2): Aminoisobutryic Acid
  MOD_RES (24)..(24): Cys-PEG
  MOD_RES (30)..(30): Acylated with a C18 fatty acyl group
  MOD_RES (30)..(30): AMIDATION

SEQ ID NO: 885 - protein, 29 aa, Artificial sequence
  Synthetic peptide
  MOD_RES (16)..(16): Xaa is Ser or alpha, alpha-disubstituted amino acid
  MOD_RES (20)..(20): Xaa is Gln or alpha, alpha-disubstituted amino acid
  MOD_RES (21)..(21): Xaa is Asp or alpha, alpha-disubstituted amino acid
  MOD_RES (24)..(24): Xaa is Gln or alpha, alpha-disubstituted amino acid
HSQGTFTSDYSKYLDXRRAXXFVXWLMNT

SEQ ID NO: 886 - protein, 29 aa, Artificial Sequence
  Synthetic peptide
  MOD_RES (16)..(16): Xaa is Aib
HSQGTFTSDYSKYLDXRRAQDFVQWLMNT

SEQ ID NO: 887 - protein, 29 aa, Artificial Sequence
  Synthetic peptide
  MOD_RES (19)..(19): Xaa is Aib
HSQGTFTSDYSKYLDSRRXQDFVQWLMNT

SEQ ID NO: 888 - protein, 29 aa, Artificial Sequence
  Synthetic peptide
  MOD_RES (20)..(20): Xaa is Aib
HSQGTFTSDYSKYLDSRRAXDFVQWLMNT

SEQ ID NO: 889 - protein, 29 aa, Artificial Sequence
  Synthetic peptide
  MOD_RES (21)..(21): Xaa is Aib
HSQGTFTSDYSKYLDSRRAQXFVQWLMNT

SEQ ID NO: 890 - protein, 29 aa, Artificial Sequence
  Synthetic peptide
  MOD_RES (24)..(24): Xaa is Aib
HSQGTFTSDYSKYLDSRRAQDFVXWLMNT

SEQ ID NO: 891 - protein, 29 aa, Artificial Sequence
  Synthetic peptide
  MOD_RES (16)..(16): Xaa is Aib
  MOD_RES (20)..(20): Xaa is Aib
HSQGTFTSDYSKYLDXRRAXDFVQWLMNT

SEQ ID NO: 892 - protein, 29 aa, Artificial Sequence
  Synthetic peptide
  MOD_RES (16)..(16): Xaa is Aib
  MOD_RES (24)..(24): Xaa is Aib
HSQGTFTSDYSKYLDXRRAQDFVXWLMNT

SEQ ID NO: 893 - protein, 29 aa, Artificial Sequence
  Synthetic peptide
  MOD_RES (20)..(20): Xaa is Aib
  MOD_RES (24)..(24): Xaa is Aib
HSQGTFTSDYSKYLDSRRAXDFVXWLMNT

SEQ ID NO: 894 - protein, 29 aa, Artificial Sequence
  Synthetic peptide
  MOD_RES (16)..(16): Xaa is Aib
  MOD_RES (20)..(20): Xaa is Aib
  MOD_RES (24)..(24): Xaa is Aib
HSQGTFTSDYSKYLDXRRAXDFVXWLMNT

SEQ ID NO: 895 - protein, 29 aa, Artificial Sequence
  Synthetic peptide
  MOD_RES (2)..(2): Xaa is Aib
  MOD_RES (16)..(16): Xaa is Aib
  MOD_RES (29)..(29): AMIDATION
HXQGTFTSDKSKYLDXRRAQDFVQWLMNT

SEQ ID NO: 896 - protein, 29 aa, Artificial Sequence
  Synthetic peptide
  MOD_RES (2)..(2): Xaa is Aib
  MOD_RES (16)..(16): Xaa is Aib
  MOD_RES (29)..(29): AMIDATION
HXQGTFTSDYSKYLDXRRAQDFVQWLMNT

SEQ ID NO: 897 - protein, 29 aa, Artificial Sequence
  Synthetic peptide
  MOD_RES (2)..(2): Xaa is Aib
  MOD_RES (10)..(10): Acylated with a C16 fatty acyl group
  MOD_RES (16)..(16): Xaa is Aib
  MOD_RES (29)..(29): AMIDATION
HXQGTFTSDKSKYLDXRRAQDFVQWLMNT

SEQ ID NO: 898 - protein, 29 aa, Artificial Sequence
  Synthetic peptide
  MOD_RES (2)..(2): Xaa is Aib
  MOD_RES (10)..(10): Acylated with a C16 fatty acyl group via Ala-Ala spacer
  MOD_RES (16)..(16): Xaa is Aib
  MOD_RES (29)..(29): AMIDATION
HXQGTFTSDKSKYLDXRRAQDFVQWLMNT

SEQ ID NO: 899 - protein, 29 aa, Artificial Sequence
  Synthetic peptide
  MOD_RES (2)..(2): Xaa is Aib
  MOD_RES (10)..(10): Acylated with a C16 fatty acyl group via dipeptide spacer
  MOD_RES (16)..(16): Xaa is Aib
  MOD_RES (29)..(29): AMIDATION
HXQGTFTSDKSKYLDXRRAQDFVQWLMNT

SEQ ID NO: 900 - protein, 29 aa, Artificial Sequence
  Synthetic peptide
  MOD_RES (2)..(2): Xaa is Aib
  MOD_RES (10)..(10): Acylated with a C16 fatty acyl group via beta-Ala-beta-Ala spacer
  MOD_RES (16)..(16): Xaa is Aib
  MOD_RES (29)..(29): AMIDATION
HXQGTFTSDKSKYLDXRRAQDFVQWLMNT

SEQ ID NO: 901 - protein, 29 aa, Artificial Sequence
  Synthetic peptide
  MOD_RES (2)..(2): Xaa is Aib
  MOD_RES (10)..(10): Acylated with a C16 fatty acyl group via 6-aminohexanoic acid spacer
  MOD_RES (16)..(16): Xaa is Aib
  MOD_RES (29)..(29): AMIDATION
HXQGTFTSDKSKYLDXRRAQDFVQWLMNT

SEQ ID NO: 902 - protein, 29 aa, Artificial Sequence
  Synthetic peptide
  MOD_RES (2)..(2): Xaa is Aib
  MOD_RES (10)..(10): Acylated with a C16 fatty acyl group via Leu-Leu spacer
  MOD_RES (16)..(16): Xaa is Aib
  MOD_RES (29)..(29): AMIDATION
HXQGTFTSDKSKYLDXRRAQDFVQWLMNT

SEQ ID NO: 903 - protein, 29 aa, Artificial Sequence
  Synthetic peptide
  MOD_RES (2)..(2): Xaa is Aib
  MOD_RES (10)..(10): Acylated with a C16 fatty acyl group via Pro-Pro spacer
  MOD_RES (16)..(16): Xaa is Aib
  MOD_RES (29)..(29): AMIDATION
HXQGTFTSDKSKYLDXRRAQDFVQWLMNT

SEQ ID NO: 904 - protein, 29 aa, Artificial Sequence
  Synthetic peptide
  MOD_RES (2)..(2): Xaa is Aib
  MOD_RES (10)..(10): Acylated with a C14 fatty acyl group
  MOD_RES (16)..(16): Xaa is Aib
  MOD_RES (24)..(24): Cys-PEG
  MOD_RES (29)..(29): AMIDATION
HXQGTFTSDKSKYLDXRRAQDFVCWLMNT

SEQ ID NO: 905 - protein, 29 aa, Artificial Sequence
  Synthetic peptide
  MOD_RES (2)..(2): Xaa is Aib
  MOD_RES (10)..(10): Acylated with a C14 fatty acyl group via dipeptide spacer
  MOD_RES (16)..(16): Xaa is Aib
  MOD_RES (24)..(24): Cys-PEG
  MOD_RES (29)..(29): AMIDATION
HXQGTFTSDKSKYLDXRRAQDFVCWLMNT

SEQ ID NO: 906 - protein, 29 aa, Artificial Sequence
  Synthetic peptide
  MOD_RES (2)..(2): Xaa is Aib
  MOD_RES (10)..(10): Acylated with a C14 fatty acyl group via dipeptide spacer
  MOD_RES (16)..(16): Xaa is Aib
  MOD_RES (29)..(29): AMIDATION
HXQGTFTSDKSKYLDXRRAQDFVQWLMNT

SEQ ID NO: 907 - protein, 29 aa, Artificial Sequence
  Synthetic peptide
  MOD_RES (2)..(2): Xaa is Aib
  MOD_RES (10)..(10): Acylated with a C14 fatty acyl group via Ala-Ala spacer
  MOD_RES (16)..(16): Xaa is Aib
  MOD_RES (24)..(24): Cys-PEG
  MOD_RES (29)..(29): AMIDATION
HXQGTFTSDKSKYLDXRRAQDFVCWLMNT

SEQ ID NO: 908 - protein, 29 aa, Artificial Sequence
  Synthetic peptide
  MOD_RES (2)..(2): Xaa is Aib
  MOD_RES (10)..(10): Acylated with a C14 fatty acyl group via Ala-Ala spacer
  MOD_RES (16)..(16): Xaa is Aib
  MOD_RES (29)..(29): AMIDATION
HXQGTFTSDKSKYLDXRRAQDFVQWLMNT

SEQ ID NO: 909 - protein, 29 aa, Artificial Sequence
  Synthetic peptide
  MOD_RES (2)..(2): Xaa is Aib
  MOD_RES (10)..(10): Acylated with a C16 fatty acyl group via Ala-Ala spacer
  MOD_RES (16)..(16): Xaa is Aib
  MOD_RES (24)..(24): Cys-PEG
  MOD_RES (29)..(29): AMIDATION
HXQGTFTSDKSKYLDXRRAQDFVCWLMNT

SEQ ID NO: 910 - protein, 29 aa, Artificial Sequence
  Synthetic peptide
  MOD_RES (2)..(2): Xaa is Aib
  MOD_RES (10)..(10): Acylated with a C16 fatty acyl group via dipeptide spacer
  MOD_RES (16)..(16): Xaa is Aib
  MOD_RES (24)..(24): Cys-PEG
  MOD_RES (29)..(29): AMIDATION
HXQGTFTSDKSKYLDXRRAQDFVCWLMNT

SEQ ID NO: 911 - protein, 29 aa, Artificial Sequence
  Synthetic peptide
  MOD_RES (2)..(2): Xaa is Aib
  MOD_RES (10)..(10): Covalently bound to a C14 fatty acyl group
  MOD_RES (16)..(16): Xaa is Aib
  MOD_RES (29)..(29): AMIDATION
HXQGTFTSDKSKYLDXRRAQDFVCWLMNT

SEQ ID NO: 912 - protein, 29 aa, Artificial Sequence
  Synthetic peptide
  MOD_RES (2)..(2): Xaa is Aib
  MOD_RES (10)..(10): Covalently bound to C14 fatty acyl group via dipeptide spacer
  MOD_RES (16)..(16): Xaa is Aib
  MOD_RES (29)..(29): AMIDATION
HXQGTFTSDKSKYLDXRRAQDFVCWLMNT

SEQ ID NO: 913 - protein, 29 aa, Artificial Sequence
  Synthetic peptide
  MOD_RES (2)..(2): Xaa is Aib
  MOD_RES (10)..(10): Covalently bound to C14 fatty acyl group via Ala-Ala spacer
  MOD_RES (16)..(16): Xaa is Aib
  MOD_RES (29)..(29): AMIDATION
HXQGTFTSDKSKYLDXRRAQDFVCWLMNT

SEQ ID NO: 914 - protein, 29 aa, Artificial Sequence
  Synthetic peptide
  MOD_RES (2)..(2): Xaa is Aib
  MOD_RES (10)..(10): Covalently bound to C16 fatty acyl group via dipeptide spacer
  MOD_RES (16)..(16): Xaa is Aib
  MOD_RES (29)..(29): AMIDATION
HXQGTFTSDKSKYLDXRRAQDFVCWLMNT

SEQ ID NO: 915 - protein, 29 aa, Artificial Sequence
  Synthetic peptide
  MOD_RES (2)..(2): Xaa is Aib
  MOD_RES (10)..(10): Covelently bound to C16 fatty acyl group via Ala-Ala spacer
  MOD_RES (16)..(16): Xaa is Aib
  MOD_RES (29)..(29): AMIDATION
HXQGTFTSDKSKYLDXRRAQDFVCWLMNT

SEQ ID NO: 916 - protein, 30 aa, Artificial Sequence; identical to SEQ ID NO: 581
  Synthetic peptide
  MOD_RES (2)..(2): D-serine, D-alanine, valine, amino n-butyric acid, glycine, N-methyl serine, aminoisobutyric acid
  MOD_RES (30)..(30): Acylated with a C14 fatty acyl group
  MOD_RES (30)..(30): AMIDATION

SEQ ID NO: 917 - protein, 29 aa, Artificial Sequence
  Synthetic peptide
  MOD_RES (2)..(2): D-serine, D-alanine, valine, amino n-butyric acid, glycine, N-methyl serine, aminoisobutyric acid
  MOD_RES (10)..(10): Acylated with a C14 fatty acyl group
  MOD_RES (29)..(29): AMIDATION
HXQGTFTSDKSKYLDERRAKDFVQWLMNT

SEQ ID NO: 918 - protein, 30 aa, Artificial Sequence; identical to SEQ ID NO: 581
  Synthetic peptide
  MOD_RES (2)..(2): D-serine, D-alanine, valine, amino n-butyric acid, glycine, N-methyl serine, aminoisobutyric acid
  MOD_RES (30)..(30): Acylated with a C16 fatty acyl group
  MOD_RES (30)..(30): AMIDATION

SEQ ID NO: 919 - protein, 29 aa, Artificial Sequence
  Synthetic peptide
  MOD_RES (2)..(2): D-serine, D-alanine, valine, amino n-butyric acid, glycine, N-methyl serine, aminoisobutyric acid
  MOD_RES (10)..(10): Acylated with a C16 fatty acyl group
  MOD_RES (29)..(29): AMIDATION
HXQGTFTSDKSKYLDERRAKDFVQWLMNT

SEQ ID NO: 920-1000 - skipped (81 entries)

SEQ ID NO: 1001 - protein, 29 aa, Homo sapiens
  MISC_FEATURE: Wild type glucagon
HSQGTFTSDYSKYLDSRRAQDFVQWLMNT

SEQ ID NO: 1002 - protein, 31 aa, Homo sapiens; identical to SEQ ID NO: 50
  MISC_FEATURE (1)..(31): GLP-1(7-37)

SEQ ID NO: 1003 - protein, 30 aa, Artificial sequence; identical to SEQ ID NO: 52
  Synthetic polypeptide
  MISC_FEATURE (1)..(30): GLP-1(7-36) amidated
  MISC_FEATURE (30)..(30): C-terminal amidation

SEQ ID NO: 1004 - protein, 42 aa, Homo sapiens; identical to SEQ ID NO: 707
  mat_peptide (1)..(42): gastric inhibitory polypeptide

SEQ ID NO: 1005 - protein, 29 aa, Artificial sequence
  Synthetic polypeptide
  MISC_FEATURE: Analog 61
  MISC_FEATURE (16)..(20): Lactam bridge between residues 16 and 20.
HSQGTFTSDYSKYLDEIHQKEFIAWLMNT

SEQ ID NO: 1006 - protein, 29 aa, Artificial sequence
  Synthetic polypeptide
  MISC_FEATURE: Analog 62
  MISC_FEATURE (16)..(20): Lactam bridge between residues 16 and 20.
HSQGTFTSDYSIYLDEIHQKEFIAWLMNT

SEQ ID NO: 1007 - protein, 29 aa, Artificial sequence
  Synthetic polypeptide
  MISC_FEATURE: Analog 63
  MISC_FEATURE (12)..(16): Lactam bridge between residues 12 and 16.
HSQGTFTSDYSKYLDEIHQKEFIAWLMNT

SEQ ID NO: 1008 - protein, 29 aa, Artificial sequence
  Synthetic polypeptide
  MISC_FEATURE: Analog 66
HSQGTFTSDYSKYLDEIHQKEFIAWLLAQ

SEQ ID NO: 1009 - protein, 29 aa, Artificial sequence
  Synthetic polypeptide
  MISC_FEATURE: Analog 68
HSQGTFTSDYSKYLDKIHQEEFIAWLMNT

SEQ ID NO: 1010 - protein, 29 aa, Artificial sequence
  Synthetic polypeptide
  MISC_FEATURE: Analog 69
  MISC_FEATURE (16)..(20): Lactam bridge between residues 16 and 20
HSQGTFTSDYSKYLDKIHQEEFIAWLMNT

SEQ ID NO: 1011 - protein, 29 aa, Artificial sequence
  Synthetic polypeptide
  MISC_FEATURE: Analog 84
  MISC_FEATURE (16)..(20): Lactam bridge between residues 16 and 20
HSQGTFTSDYSIYLDEIHQKEFICWLLAQ

SEQ ID NO: 1012 - protein, 29 aa, Artificial sequence
  Synthetic polypeptide
  MISC_FEATURE: Analog 85
  MISC_FEATURE (16)..(20): Lactam bridge between residues 16 and 20
  MISC_FEATURE (24)..(24): PEG (20kDa) covalently attached to Cysteine
HSQGTFTSDYSIYLDEIHQKEFICWLLAQ

SEQ ID NO: 1013 - protein, 29 aa, Artificial sequence
  Synthetic polypeptide
  MISC_FEATURE: Analog 92
HSQGTFTSDYSIYLDEKHQKEFIAWLLAQ

SEQ ID NO: 1014 - protein, 29 aa, Artificial sequence
  Synthetic polypeptide
  MISC_FEATURE: Analog 93
  MISC_FEATURE (16)..(20): Lactam bridge between residues 16 and 20
  MISC_FEATURE (17)..(21): Lactam bridge between residues 17 and 21
HSQGTFTSDYSIYLDEKHQKEFIAWLLAQ

SEQ ID NO: 1015 - protein, 29 aa, Artificial sequence
  Synthetic polypeptide
  MISC_FEATURE: Analog 95
  MISC_FEATURE (16)..(20): Lactam bridge between residues 16 and 20
HAEGTFISDYSIAMDEIHQKDFVNWLLAQ

SEQ ID NO: 1016 - protein, 29 aa, Artificial sequence
  Synthetic polypeptide
  MISC_FEATURE: Analog 96
  MISC_FEATURE (16)..(20): Lactam bridge between residues 16 and 20
YAEGTFISDYSIAMDEIHQKDFVNWLLAQ

SEQ ID NO: 1017 - protein, 29 aa, Artificial sequence
  Synthetic polypeptide
  MISC_FEATURE: Analog 97
  MISC_FEATURE (16)..(20): Lactam bridge between residues 16 and 20
HAEGTFTSDYSIYMDEIHQKDFVNWLLAQ

SEQ ID NO: 1018 - protein, 29 aa, Artificial sequence
  Synthetic polypeptide
  MISC_FEATURE: Analog 98
  MISC_FEATURE (16)..(20): Lactam bridge between residues 16 and 20
YAEGTFTSDYSIYMDEIHQKDFVNWLLAQ

SEQ ID NO: 1019 - protein, 42 aa, Artificial sequence
  Synthetic polypeptide
  MISC_FEATURE: Analog 99
YAEGTFISDYSIAMDKIHQQDFVNWLLAQKGKKNWLKHNITQ

SEQ ID NO: 1020 - protein, 42 aa, Artificial sequence
  Synthetic polypeptide
  MISC_FEATURE: Analog 100
  MOD_RES (2)..(2): Xaa is Aib
YXEGTFISDYSIAMDKIHQQDFVNWLLAQKGKKNWLKHNITQ

SEQ ID NO: 1021 - protein, 42 aa, Artificial sequence
  Synthetic polypeptide
  MISC_FEATURE: Analog 101
YAPGTFISDYSIAMDKIHQQDFVNWLLAQKGKKNWLKHNITQ

SEQ ID NO: 1022 - protein, 42 aa, Artificial sequence
  Synthetic polypeptide
  MISC_FEATURE: Analog 102
  MOD_RES (2)..(2): Xaa is Aib
YXEGTFISDYSIAMDKIHQQDFVCWLLAQKGKKNWLKHNITQ

SEQ ID NO: 1023 - protein, 42 aa, Artificial sequence
  Synthetic polypeptide
  MISC_FEATURE: Analog 104
YAPGTFISDYSIAMDKIHQQDFVCWLLAQKGKKNWLKHNITQ

SEQ ID NO: 1024 - protein, 42 aa, Artificial sequence; identical to SEQ ID NO: 1023
  Synthetic polypeptide
  MISC_FEATURE: Analog 105
  MISC_FEATURE (24)..(24): PEG (40kDa) attached to Cysteine

SEQ ID NO: 1025 - protein, 29 aa, Artificial sequence
  Synthetic polypeptide
  MISC_FEATURE: Analog 106
YAEGTFISDYSIAMDKIHQQDFVNWLLAQ

SEQ ID NO: 1026 - protein, 29 aa, Artificial sequence
  Synthetic polypeptide
  MISC_FEATURE: Analog 107
  MISC_FEATURE (16)..(20): Lactam bridge between residues 16 and 20
HSQGTFISDYSKYLDEIHQKEFIAWLMNT

SEQ ID NO: 1027 - protein, 29 aa, Artificial sequence
  Synthetic polypeptide
  MISC_FEATURE: Analog 108
  MISC_FEATURE (16)..(20): Lactam bridge between residues 16 and 20
HSQGTFISDYSKALDEIHQKEFIAWLMNT

SEQ ID NO: 1028 - protein, 29 aa, Artificial sequence
  Synthetic polypeptide
  MISC_FEATURE: Analog 109
  MISC_FEATURE (16)..(20): Lactam bridge between residues 16 and 20
YSQGTFTSDYSKYLDEIHQKDFVNWLLAQ

SEQ ID NO: 1029 - protein, 29 aa, Artificial sequence
  Synthetic polypeptide
  MISC_FEATURE: Analog 110
  MISC_FEATURE (16)..(20): Lactam bridge between residues 16 and 20
YSQGTFTSDYSIYLDEIHQKDFVNWLLAQ

SEQ ID NO: 1030 - protein, 29 aa, Artificial sequence
  Synthetic polypeptide
  MISC_FEATURE: Analog 111
  MISC_FEATURE (16)..(20): Lactam bridge between residues 16 and 20
HSQGTFTSDYSKYLDEIHQKDFVNWLLAQ

SEQ ID NO: 1031 - protein, 24 aa, Artificial sequence
  Synthetic polypeptide
  MISC_FEATURE: Analog 113
  MOD_RES (1)..(1): Xaa is 3-phenyllactic acid
  MISC_FEATURE (11)..(15): Lactam bridge between residues 11 and 15
XISDYSIAMDEIHQKDFVNWLLAQ

SEQ ID NO: 1032 - protein, 24 aa, Artificial sequence
  Synthetic polypeptide
  MISC_FEATURE: Analog 114
  MOD_RES (1)..(1): Xaa is 3-phenyllactic acid
  MISC_FEATURE (11)..(15): Lactam bridge between residues 11 and 15
XTSDYSKYLDEIHQKDFVNWLLAQ

SEQ ID NO: 1033 - protein, 39 aa, Artificial sequence
  Synthetic polypeptide
  MISC_FEATURE: Analog 115
  MISC_FEATURE (16)..(20): Lactam bridge between residues 16 and 20
HSQGTFTSDYSKYLDEIHQKDFVNWLLAGGPSSGAPPPS

SEQ ID NO: 1034 - protein, 39 aa, Artificial sequence
  Synthetic polypeptide
  MISC_FEATURE: Analog 116
  MISC_FEATURE (16)..(20): Lactam bridge between residues 16 and 20
YSQGTFTSDYSKYLDEIHQKDFVNWLLAGGPSSGAPPPS

SEQ ID NO: 1035 - protein, 29 aa, Artificial sequence
  Synthetic polypeptide
  MISC_FEATURE: Analog 118
  MISC_FEATURE (16)..(20): Lactam bridge between residues 16 and 20
YSQGTFTSDYSKYLDEIHQKEFVNWLLAQ

SEQ ID NO: 1036 - protein, 39 aa, Artificial sequence
  Synthetic polypeptide
  MISC_FEATURE: Analog 120
  MISC_FEATURE (16)..(20): Lactam bridge between residues 16 and 20
YSQGTFTSDYSKYLDEQAAKEFIAWLMNGGPSSGAPPPS

SEQ ID NO: 1037 - protein, 29 aa, Artificial sequence
  Synthetic polypeptide
  MISC_FEATURE: Analog 124
  MISC_FEATURE (16)..(20): Lactam bridge between residues 16 and 20
HSQGTFTSDYSIYMDEIHQKDFVNWLLAQ

SEQ ID NO: 1038 - protein, 29 aa, Artificial sequence
  Synthetic polypeptide
  MISC_FEATURE: Analog 125
  MISC_FEATURE (16)..(20): Lactam bridge between residues 16 and 20
YSQGTFTSDYSIYMDEIHQKDFVNWLLAQ

SEQ ID NO: 1039 - protein, 39 aa, Artificial sequence
  Synthetic polypeptide
  MISC_FEATURE: Analog 127
  MISC_FEATURE (16)..(20): Lactam bridge between residues 16 and 20
YSQGTFTSDYSKYLDEQAAKEFVNWLLAGGPSSGAPPPS

SEQ ID NO: 1040 - protein, 39 aa, Artificial sequence
  Synthetic polypeptide
  MISC_FEATURE: Analog 128
  MISC_FEATURE (16)..(20): Lactam bridge between residues 16 and 20
HSQGTFTSDYSKYLDEIHQKDFIAWLMNGGPSSGAPPPS

SEQ ID NO: 1041 - protein, 39 aa, Artificial sequence
  Synthetic polypeptide
  MISC_FEATURE: Analog 129
  MISC_FEATURE (16)..(20): Lactam bridge between residues 16 and 20
YSQGTFTSDYSKYLDEIHQKDFIAWLMNGGPSSGAPPPS

SEQ ID NO: 1042 - protein, 39 aa, Artificial sequence
  Synthetic polypeptide
  MISC_FEATURE: Analog 139
  MISC_FEATURE (16)..(20): Lactam bridge between residues 16 and 20
YSQGTFTSDYSKYLDEQAAKEFIAWLLAGGPSSGAPPPS

SEQ ID NO: 1043 - protein, 39 aa, Artificial sequence
  Synthetic polypeptide
  MISC_FEATURE: Analog 140
  MISC_FEATURE (16)..(20): Lactam bridge between residues 16 and 20
YSQGTFTSDYSIYLDEQAAKEFVNWLLAGGPSSGAPPPS

SEQ ID NO: 1044 - protein, 39 aa, Artificial sequence
  Synthetic polypeptide
  MISC_FEATURE: Analog 141
  MISC_FEATURE (16)..(20): Lactam bridge between residuess 16 and 20
YSQGTFTSDYSKYMDEQAAKEFVNWLLAGGPSSGAPPPS

SEQ ID NO: 1045 - protein, 39 aa, Artificial sequence
  Synthetic polypeptide
  MISC_FEATURE: Analog 142
  MISC_FEATURE (16)..(20): Lactam bridge between residues 16 and 20
YAEGTFTSDYSIYMDEQAAKEFVNWLLAGGPSSGAPPPS

SEQ ID NO: 1046 - protein, 39 aa, Artificial sequence
  Synthetic polypeptide
  MISC_FEATURE: Analog 143
  MISC_FEATURE (16)..(20): Lactam bridge between residues 16 and 20
YSQGTFTSDYSKYLDERRAKEFVNWLLAGGPSSGAPPPS

SEQ ID NO: 1047 - protein, 39 aa, Artificial sequence
  Synthetic polypeptide
  MISC_FEATURE: Analog 144
  MISC_FEATURE (16)..(20): Lactam bridge between residues 16 and 20
YAQGTFTSDYSIYMDEQAAKEFVNWLLAGGPSSGAPPPS

SEQ ID NO: 1048 - protein, 39 aa, Artificial sequence
  Synthetic polypeptide
  MISC_FEATURE: Analog 145
  MISC_FEATURE (16)..(20): Lactam bridge between residues 16 and 20
YAQGTFISDYSKYLDEQAAKEFVNWLLAGGPSSGAPPPS

SEQ ID NO: 1049 - protein, 39 aa, Artificial sequence; identical to SEQ ID NO: 1048
  Synthetic polypeptide
  MISC_FEATURE: Analog 146
  MISC_FEATURE (16)..(20): Lactam bridge between residues 16 and 20

SEQ ID NO: 1050 - protein, 39 aa, Artificial sequence
  Synthetic polypeptide
  MISC_FEATURE: Analog 147
  MISC_FEATURE (16)..(20): Lactam bridge between residues 16 and 20
YSQGTFTSDYSIYLDEQAAKEFIAWLLAGGPSSGAPPPS

SEQ ID NO: 1051 - protein, 39 aa, Artificial sequence
  Synthetic polypeptide
  MISC_FEATURE: Analog 148
  MISC_FEATURE (16)..(20): Lactam bridge between residues 16 and 20
YSEGTFTSDYSIYLDEQAAKEFIAWLLAGGPSSGAPPPS

SEQ ID NO: 1052 - protein, 39 aa, Artificial sequence
  Synthetic polypeptide
  MISC_FEATURE: Analog 149
  MISC_FEATURE (16)..(20): Lactam bridge between residues 16 and 20
YAEGTFTSDYSIYLDEQAAKEFVNWLLAGGPSSGAPPPS

SEQ ID NO: 1053 - protein, 39 aa, Artificial sequence
  Synthetic polypeptide
  MISC_FEATURE: Analog 150
  MISC_FEATURE (16)..(20): Lactam bridge between residues 16 and 20
YSQGTFISDYSIYLDEQAAKEFVNWLLAGGPSSGAPPPS

SEQ ID NO: 1054 - protein, 39 aa, Artificial sequence; identical to SEQ ID NO: 1042
  Synthetic polypeptide
  MISC_FEATURE: Analog 151
  MISC_FEATURE (16)..(20): Lactam bridge between residues 16 and 20

SEQ ID NO: 1055 - protein, 39 aa, Artificial sequence
  Synthetic polypeptide
  MISC_FEATURE: Analog 152
  MOD_RES (2)..(2): Xaa is Aib
  MISC_FEATURE (16)..(20): Lactam bridge between residues 16 and 20
YXQGTFTSDYSIYLDEQAAKEFVNWLLAGGPSSGAPPPS

SEQ ID NO: 1056 - protein, 39 aa, Artificial sequence
  Synthetic polypeptide
  MISC_FEATURE: Analog 154
  MOD_RES (1)..(1): Xaa is hippuric acid
  MISC_FEATURE (16)..(20): Lactam bridge between residues 16 and 20
XSQGTFTSDYSIYLDEQAAKEFVNWLLAGGPSSGAPPPS

SEQ ID NO: 1057 - protein, 39 aa, Artificial sequence; identical to SEQ ID NO: 1039
  Synthetic polypeptide
  MISC_FEATURE: Analog 155
  MISC_FEATURE (12)..(16): Lactam bridge between residues 12 and 16

SEQ ID NO: 1058 - protein, 39 aa, Artificial sequence
  Synthetic polypeptide
  MISC_FEATURE: Analog 156
  MISC_FEATURE (20)..(24): Lactam bridge between residues 20 and 24
YSQGTFTSDYSIYLDEQAAKEFVEWLLAGGPSSGAPPPS

SEQ ID NO: 1059 - protein, 39 aa, Artificial sequence
  Synthetic polypeptide
  MISC_FEATURE: Analog 157
  MISC_FEATURE (24)..(28): Lactam bridge between residues 24 and 28
YSQGTFTSDYSIYLDEQAAKEFVEWLLKGGPSSGAPPPS

SEQ ID NO: 1060 - protein, 39 aa, Artificial sequence
  Synthetic polypeptide
  MISC_FEATURE: Analog 158
  MOD_RES (2)..(2): Xaa is Aib
  MISC_FEATURE (16)..(20): Lactam bridge between residues 16 and 20
YXQGTFTSDYSIYLDEQAAKEFVCWLLAGGPSSGAPPPS

SEQ ID NO: 1061 - protein, 39 aa, Artificial sequence
  Synthetic polypeptide
  MISC_FEATURE: Analog 162
  MOD_RES (2)..(2): Xaa is Aib
  MISC_FEATURE (16)..(20): Lactam bridge between residues 16 and 20
YXQGTFTSDYSYYLDEQAVKEFVNWLIAGGPSSGAPPPS

SEQ ID NO: 1062 - protein, 29 aa, Artificial sequence
  Synthetic polypeptide
  MISC_FEATURE: Analog 163
  MISC_FEATURE (16)..(20): Lactam bridge between residues 16 and 20
YSQGTFTSDYSIYLDEQAAKEFVNWLLAG

SEQ ID NO: 1063 - protein, 29 aa, Artificial sequence
  Synthetic polypeptide
  MISC_FEATURE: Analog 164
  MOD_RES (2)..(2): Xaa is Aib
  MISC_FEATURE (16)..(20): Lactam bridge between residues 16 and 20
YXQGTFTSDYSIYLDEQAAKEFVNWLLAG

SEQ ID NO: 1064 - protein, 40 aa, Artificial sequence
  Synthetic polypeptide
  MISC_FEATURE: Analog 165
  MOD_RES (2)..(2): Xaa is Aib
  MISC_FEATURE (16)..(20): Lactam bridge between residues 16 and 20
YXQGTFTSDYSIYLDEQAAKEFVNWLLAGGPSSGAPPPSC

SEQ ID NO: 1065 - protein, 40 aa, Artificial sequence; identical to SEQ ID NO: 1064
  Synthetic polypeptide
  MISC_FEATURE: Analog 166
  MOD_RES (2)..(2): Xaa is d-alanine
  MISC_FEATURE (16)..(20): Lactam bridge between residues 16 and 20

SEQ ID NO: 1066 - protein, 39 aa, Artificial sequence
  Synthetic polypeptide
  MISC_FEATURE: Analog 167
  MISC_FEATURE (17)..(20): Lactam bridge between residues 17 and 20
YSQGTFTSDYSIYLDEEAAKEFVNWLLAGGPSSGAPPPS

SEQ ID NO: 1067 - protein, 39 aa, Artificial sequence
  Synthetic polypeptide
  MISC_FEATURE: Analog 168
  MISC_FEATURE (18)..(21): Lactam bridge between residues 18 and 21
YSQGTFTSDYSIYLDEQKAKEFVNWLLAGGPSSGAPPPS

SEQ ID NO: 1068 - protein, 29 aa, Artificial sequence
  Synthetic polypeptide
  MISC_FEATURE: Analog 169
  MOD_RES (2)..(2): Xaa is Aib
  MISC_FEATURE (16)..(20): Lactam bridge between residues 16 and 20
YXQGTFTSDYSIYLDEQAAKEFVCWLLAG

SEQ ID NO: 1069 - protein, 40 aa, Artificial sequence; identical to SEQ ID NO: 1064
  Synthetic polypeptide
  MISC_FEATURE: Analog 170
  MOD_RES (2)..(2): Xaa is Aib
  MISC_FEATURE (16)..(20): Lactam bridge between residues 16 and 20
  MISC_FEATURE (40)..(40): PEG (40kDa) covalently attached to Cysteine

SEQ ID NO: 1070 - protein, 29 aa, Artificial sequence
  Synthetic polypeptide
  MISC_FEATURE: Analog 172
  MOD_RES (2)..(2): Xaa is Aib
  MISC_FEATURE (16)..(20): Lactam bridge between residues 16 and 20
  MISC_FEATURE (24)..(24): PEG (40kDa) covalently attached to Cysteine
YXQGTFTSDYSIYLDEQAAKEFVCWLLAG

SEQ ID NO: 1071 - protein, 40 aa, Artificial sequence
  Synthetic polypeptide
  MISC_FEATURE: Analog 174
  MOD_RES (2)..(2): Xaa is Aib
  MISC_FEATURE (16)..(20): Lactam bridge between residues 16 and 20
YXEGTFTSDYSIYLDEQAAKEFVNWLLAGGPSSGAPPPSC

SEQ ID NO: 1072 - protein, 39 aa, Artificial sequence; identical to SEQ ID NO: 1060
  Synthetic polypeptide
  MISC_FEATURE: Analog 175
  MOD_RES (2)..(2): Xaa is Aib
  MISC_FEATURE (16)..(20): Lactam bridge between residues 16 and 20
  MISC_FEATURE (24)..(24): PEG (40kDa) covalently attached to Cysteine

SEQ ID NO: 1073 - protein, 40 aa, Artificial sequence
  Synthetic polypeptide
  MISC_FEATURE: Analog 176
  MOD_RES (2)..(2): Xaa is Aib
  MISC_FEATURE (16)..(20): Lactam bridge between residues 16 and 20
YXQGTFISDYSIYLDEQAAKEFVNWLLAGGPSSGAPPPSC

SEQ ID NO: 1074 - protein, 29 aa, Artificial sequence
  Synthetic polypeptide
  MISC_FEATURE: Analog 177
  MOD_RES (2)..(2): Xaa is Aib
  MISC_FEATURE (16)..(20): Lactam bridge between residues 16 and 20
YXQGTFISDYSIYLDEQAAKEFVCWLLAG

SEQ ID NO: 1075 - protein, 40 aa, Artificial sequence; identical to SEQ ID NO: 1071
  Synthetic polypeptide
  MISC_FEATURE: Analog 178
  MOD_RES (2)..(2): Xaa is Aib
  MISC_FEATURE (16)..(20): Lactam bridge between residues 16 and 20
  MISC_FEATURE (40)..(40): PEG (40kDa) covalently attached to Cysteine

SEQ ID NO: 1076 - protein, 29 aa, Artificial sequence
  Synthetic polypeptide
  MISC_FEATURE: Analog 179
  MOD_RES (2)..(2): Xaa is Aib
  MISC_FEATURE (16)..(20): Lactam bridge between residues 16 and 20
  MISC_FEATURE (24)..(24): PEG (40kDa) covalently attached to Cysteine
YXQGTFISDYSIYLDEQAAKEFVCWLLAG

SEQ ID NO: 1077 - protein, 40 aa, Artificial sequence; identical to SEQ ID NO: 1073
  Synthetic polypeptide
  MISC_FEATURE: Analog 182
  MOD_RES (2)..(2): Xaa is Aib
  MISC_FEATURE (16)..(20): Lactam bridge between residues 16 and 20
  MISC_FEATURE (40)..(40): PEG (40kDa) covalently attached to Cysteine

SEQ ID NO: 1078 - protein, 29 aa, Artificial sequence
  Synthetic polypeptide
  MISC_FEATURE: Analog 186
  MOD_RES (2)..(2): Xaa is Aib
  MISC_FEATURE (16)..(20): Lactam bridge between residues 16 and 20
  MISC_FEATURE (24)..(24): PEG (40kDa) covalently attached to Cysteine
YXQGTFTSDYSIYLDEQAAKEFVCWLMNG

SEQ ID NO: 1079 - protein, 39 aa, Artificial sequence; identical to SEQ ID NO: 1055
  Synthetic polypeptide
  MISC_FEATURE: Analog 191
  MOD_RES (2)..(2): Xaa is Aib

SEQ ID NO: 1080 - protein, 34 aa, Artificial sequence
  Synthetic polypeptide
  MISC_FEATURE: Analog 192
FTSDYSIYLDEQAAKEFVNWLLAGGPSSGAPPPS

SEQ ID NO: 1081 - protein, 38 aa, Artificial sequence
  Synthetic polypeptide
  MISC_FEATURE: Analog 194
  MOD_RES (1)..(1): Xaa is Aib
XQGTFTSDYSIYLDEEAVRLFVNWLLAGGPSSGAPPPS

SEQ ID NO: 1082 - protein, 26 aa, Artificial sequence
  Synthetic polypeptide
  MISC_FEATURE: Analog 197
  MISC_FEATURE (13)..(17): Lactam bridge between residues 13 and 17
GTFTSDYSIYLDEQAAKEFVNWLLAG

SEQ ID NO: 1083 - protein, 28 aa, Artificial sequence
  Synthetic polypeptide
  MISC_FEATURE: Analog 198
  MOD_RES (1)..(1): Xaa is Aib
  MISC_FEATURE (15)..(19): Lactam bridge between residues 15 and 19
XQGTFTSDYSIYLDEQAAKEFVNWLLAG

SEQ ID NO: 1084 - protein, 40 aa, Artificial sequence
  Synthetic polypeptide
  MISC_FEATURE: Analog 199
  MOD_RES (2)..(2): Xaa is Aib
  MISC_FEATURE (16)..(20): Lactam bridge between residues 16 and 20
YXQGTFVSDYSIYLDEQAAKEFVNWLLAGGPSSGAPPPSC

SEQ ID NO: 1085 - protein, 40 aa, Artificial sequence
  Synthetic polypeptide
  MISC_FEATURE: Analog 200
  MOD_RES (2)..(2): Xaa is Aib
  MISC_FEATURE (16)..(20): Lactam bridge between residues 16 and 20
  MOD_RES (27)..(27): Xaa is Nle
YXQGTFTSDYSIYLDEQAAKEFVNWLXAGGPSSGAPPPSC

SEQ ID NO: 1086 - protein, 39 aa, Artificial sequence
  Synthetic polypeptide
  MISC_FEATURE: Analog 201
  MOD_RES (2)..(2): Xaa is Aib
YXQGTFTSDYSIYLDEEAVRLFVNWLLAGGPSSGAPPPS

SEQ ID NO: 1087 - protein, 40 aa, Artificial sequence; identical to SEQ ID NO: 1084
  Synthetic polypeptide
  MISC_FEATURE: Analog 202
  MOD_RES (2)..(2): Xaa is Aib
  MISC_FEATURE (16)..(20): Lactam bridge between residues 16 and 20
  MISC_FEATURE (40)..(40): PEG (40kDa) covalently attached to Cysteine

SEQ ID NO: 1088 - protein, 40 aa, Artificial sequence; identical to SEQ ID NO: 1085
  Synthetic polypeptide
  MISC_FEATURE: Analog 203
  MOD_RES (2)..(2): Xaa is Aib
  MISC_FEATURE (16)..(20): Lactam bridge between residues 16 and 20
  MOD_RES (27)..(27): Xaa is Nle
  MISC_FEATURE (40)..(40): PEG (40kDa) covalently attached to Cysteine

SEQ ID NO: 1089 - protein, 40 aa, Artificial sequence
  Synthetic polypeptide
  MISC_FEATURE: Analog 204
  MOD_RES (2)..(2): Xaa is Aib
  MISC_FEATURE (16)..(20): Lactam bridge between residues 16 and 20
YXEGTFTSDYSIYLDEQAAKEFVNWLLAGRPSSGAPPPSC

SEQ ID NO: 1090 - protein, 40 aa, Artificial sequence; identical to SEQ ID NO: 1089
  Synthetic polypeptide
  MISC_FEATURE: Analog 205
  MOD_RES (2)..(2): Xaa is Aib
  MISC_FEATURE (16)..(20): Lactam bridge between residues 16 and 20
  MISC_FEATURE (40)..(40): PEG (40kDa) covalently attached to Cysteine

SEQ ID NO: 1091 - protein, 43 aa, Artificial sequence
  Synthetic polypeptide
  MISC_FEATURE: Analog 206
  MOD_RES (2)..(2): Xaa is Aib
  MISC_FEATURE (16)..(20): Lactam bridge between residues 16 and 20
YXEGTFTSDYSIYLDEQAAKEFVNWLLAGKGKKNWLKHNITQC

SEQ ID NO: 1092 - protein, 43 aa, Artificial sequence
  Synthetic polypeptide
  MISC_FEATURE: Analog 207
  MOD_RES (2)..(2): Xaa is Aib
  MISC_FEATURE (16)..(20): Lactam bridge between residues 16 and 20
YXQGTFTSDYSIYLDEQAAKEFVNWLLAGKGKKNWLKHNITQC

SEQ ID NO: 1093 - protein, 43 aa, Artificial sequence; identical to SEQ ID NO: 1091
  Synthetic polypeptide
  MISC_FEATURE: Analog 208
  MOD_RES (2)..(2): Xaa is Aib
  MISC_FEATURE (16)..(20): Lactam bridge between residues 16 and 20
  MISC_FEATURE (43)..(43): PEG (40kDa) covalently attached to Cysteine

SEQ ID NO: 1094 - protein, 40 aa, Artificial sequence
  Synthetic polypeptide
  MISC_FEATURE: Analog 209
  MOD_RES (2)..(2): Xaa is Aib
  MISC_FEATURE (9)..(12): Lactam bridge between residues 9 and 12
  MISC_FEATURE (16)..(20): Lactam bridge between residues 16 and 20
YXQGTFTSEYSKYLDEQAAKEFVNWLLAGGPSSGAPPPSC

SEQ ID NO: 1095 - protein, 10 aa, Artificial sequence
  Synthetic polypeptide
  MISC_FEATURE: CEX
GPSSGAPPPS

SEQ ID NO: 1096 - protein, 11 aa, Artificial sequence
  Synthetic polypeptide
  MISC_FEATURE (1)..(1): Xaa is any amino acid
XGPSSGAPPPS

SEQ ID NO: 1097 - protein, 8 aa, Artificial sequence
  Synthetic polypeptide
KRNRNNIA

SEQ ID NO: 1098 - protein, 4 aa, Artificial sequence
  Synthetic polypeptide
KRNR

SEQ ID NO: 1099 - protein, 40 aa, Artificial Sequence
  Synthetic polypeptide
  MOD_RES (2)..(2): Xaa is Aib
  MOD_RES (20)..(20): Xaa is Aib
  MISC_FEATURE (40)..(40): PEG (40kDa) covalently attached to Cysteine
  MISC_FEATURE (40)..(40): C-terminal amidation
YXEGTFTSDYSIYLDKQAAXEFVNWLLAGGPSSGAPPPSC

SEQ ID NO: 1100 - protein, 40 aa, Artificial Sequence
  Synthetic polypeptide
  MOD_RES (2)..(2): Xaa is Aib
  MOD_RES (20)..(20): Xaa is Aib
  MISC_FEATURE (24)..(24): PEG (40kDa) covalently attached to Cysteine
  MISC_FEATURE (40)..(40): C-terminal amidation
YXEGTFTSDYSIYLDKQAAXEFVCWLLAGGPSSGAPPPSK

SEQ ID NO: 1101 - protein, 40 aa, Artificial Sequence; identical to SEQ ID NO: 1100
  Synthetic polypeptide
  MOD_RES (2)..(2): Xaa is Aib
  MOD_RES (20)..(20): Xaa is Aib
  MISC_FEATURE (24)..(24): PEG (40kDa) covalently attached to Cysteine
  MISC_FEATURE (40)..(40): 16 Carbon fatty acyl group covalently attached to Lysine
  MISC_FEATURE (40)..(40): C-terminal amidation

SEQ ID NO: 1102 - protein, 40 aa, Artificial Sequence; identical to SEQ ID NO: 1100
  Synthetic polypeptide
  MOD_RES (2)..(2): Xaa is Aib
  MOD_RES (20)..(20): Xaa is Aib
  MISC_FEATURE (24)..(24): PEG (40kDa) covalently attached to Cysteine
  MISC_FEATURE (40)..(40): 14 Carbon fatty acyl group covalently attached Lysine
  MISC_FEATURE (40)..(40): C-terminal amidation

SEQ ID NO: 1103 - protein, 40 aa, Artificial Sequence; identical to SEQ ID NO: 1100
  Synthetic polypeptide
  MOD_RES (2)..(2): Xaa is Aib
  MOD_RES (20)..(20): Xaa is Aib
  MISC_FEATURE (24)..(24): PEG (40kDa) covalently attached to Cysteine
  MISC_FEATURE (40)..(40): 18 Carbon fatty acyl group covalently attached to Lysine
  MISC_FEATURE (40)..(40): C-terminal amidation

SEQ ID NO: 1104 - protein, 40 aa, Artificial Sequence
  Synthetic polypeptide
  MOD_RES (2)..(2): Xaa is Aib
  MOD_RES (20)..(20): Xaa is Aib
  MISC_FEATURE (40)..(40): 14 Carbon fatty acyl group covalently attached to Lysine
  MISC_FEATURE (40)..(40): C-terminal amidation
YXEGTFTSDYSIYLDKQAAXEFVNWLLAGGPSSGAPPPSK

SEQ ID NO: 1105 - protein, 40 aa, Artificial Sequence; identical to SEQ ID NO: 1104
  Synthetic polypeptide
  MOD_RES (2)..(2): Xaa is Aib
  MOD_RES (20)..(20): Xaa is Aib
  MISC_FEATURE (40)..(40): 16 Carbon fatty acyl group covalently attached Lysine
  MISC_FEATURE (40)..(40): C-terminal amidation

SEQ ID NO: 1106 - protein, 40 aa, Artificial Sequence; identical to SEQ ID NO: 1104
  Synthetic polypeptide
  MOD_RES (2)..(2): Xaa is Aib
  MOD_RES (20)..(20): Xaa is Aib
  MISC_FEATURE (40)..(40): 18 Carbon fatty acyl group covalently attached to Lysine
  MISC_FEATURE (40)..(40): C-terminal amidation

SEQ ID NO: 1107 - protein, 40 aa, Artificial Sequence
  Synthetic polypeptide
  MOD_RES (2)..(2): Xaa is Aib
  MOD_RES (20)..(20): Xaa is Aib
  MISC_FEATURE (40)..(40): C-terminal amidation
YXQGTFTSDYSIYLDKQAAXEFVNWLLAGGPSSGAPPPSC

SEQ ID NO: 1108 - protein, 40 aa, Artificial Sequence; identical to SEQ ID NO: 1107
  Synthetic polypeptide
  MOD_RES (2)..(2): Xaa is Aib
  MOD_RES (20)..(20): Xaa is Aib
  MISC_FEATURE (40)..(40): PEG (40kDa) attached to Cysteine
  MISC_FEATURE (40)..(40): C-terminal amidation

SEQ ID NO: 1109 - protein, 40 aa, Artificial Sequence; identical to SEQ ID NO: 1099
  Synthetic polypeptide
  MOD_RES (2)..(2): Xaa is Aib
  MOD_RES (20)..(20): Xaa is Aib
  MISC_FEATURE (40)..(40): C-terminal amidation

SEQ ID NO: 1110 - protein, 29 aa, Artificial Sequence
  Synthetic polypeptide
  MOD_RES (2)..(2): Xaa is Aib
  MOD_RES (20)..(20): Xaa is Aib
  MISC_FEATURE (29)..(29): C-terminal amidation
YXQGTFTSDYSIYLDKQAAXEFVCWLLAG

SEQ ID NO: 1111 - protein, 40 aa, Artificial Sequence; identical to SEQ ID NO: 1104
  Synthetic polypeptide
  MOD_RES (2)..(2): Xaa is Aib
  MOD_RES (20)..(20): Xaa is Aib
  MISC_FEATURE (40)..(40): C-terminal amidation

SEQ ID NO: 1112 - protein, 29 aa, Artificial Sequence
  Synthetic polypeptide
  MISC_FEATURE (2)..(2): Xaa is Aib
  MISC_FEATURE (20)..(20): Xaa is Aib
YXQGTFTSDYSIYLDKQAAXEFVNWLLAG

SEQ ID NO: 1113 - protein, 39 aa, Artificial Sequence
  Synthetic polypeptide
  MOD_RES (2)..(2): Xaa is Aib
  MOD_RES (20)..(20): Xaa is Aib
  MISC_FEATURE (24)..(24): 14 Carbon fatty acyl group covalently attached to Lysine
  MISC_FEATURE (39)..(39): C-terminal amidation
YXEGTFTSDYSIYLDKQAAXEFVKWLLAGGPSSGAPPPS

SEQ ID NO: 1114 - protein, 39 aa, Artificial Sequence; identical to SEQ ID NO: 1113
  Synthetic polypeptide
  MOD_RES (2)..(2): Xaa is Aib
  MOD_RES (20)..(20): Xaa is Aib
  MISC_FEATURE (24)..(24): 16 Carbon fatty acyl group covalently attached to Lysine
  MISC_FEATURE (39)..(39): C-terminal amidation

SEQ ID NO: 1115 - protein, 39 aa, Artificial Sequence; identical to SEQ ID NO: 1113
  Synthetic polypeptide
  MOD_RES (2)..(2): Xaa is Aib
  MOD_RES (20)..(20): Xaa is Aib
  MISC_FEATURE (24)..(24): 18 Carbon fatty acyl group covalently attached to Lysine
  MISC_FEATURE (39)..(39): C-terminal amidation

SEQ ID NO: 1116 - protein, 39 aa, Artificial Sequence; identical to SEQ ID NO: 1113
  Synthetic polypeptide
  MOD_RES (2)..(2): Xaa is Aib
  MOD_RES (20)..(20): Xaa is Aib
  MISC_FEATURE (39)..(39): C-terminal amidation

SEQ ID NO: 1117 - protein, 39 aa, Artificial Sequence
  Synthetic polypeptide
  MOD_RES (2)..(2): Xaa is Aib
  MISC_FEATURE (10)..(10): 14 Carbon fatty acyl group covalently attached to Lysine
  MOD_RES (20)..(20): Xaa is Aib
  MISC_FEATURE (39)..(39): C-terminal amidation
YXEGTFTSDKSIYLDKQAAXEFVNWLLAGGPSSGAPPPS

SEQ ID NO: 1118 - protein, 39 aa, Artificial Sequence; identical to SEQ ID NO: 1117
  Synthetic polypeptide
  MOD_RES (2)..(2): Xaa is Aib
  MISC_FEATURE (10)..(10): 16 Carbon fatty acyl group covalently attached to Lysine
  MOD_RES (20)..(20): Xaa is Aib
  MISC_FEATURE (39)..(39): C-terminal amidation

SEQ ID NO: 1119 - protein, 39 aa, Artificial Sequence; identical to SEQ ID NO: 1117
  Synthetic polypeptide
  MOD_RES (2)..(2): Xaa is Aib
  MISC_FEATURE (10)..(10): 18 Carbon fatty acyl group covalently attached to Lysine
  MOD_RES (20)..(20): Xaa is Aib
  MISC_FEATURE (39)..(39): C-terminal amidation

SEQ ID NO: 1120 - protein, 39 aa, Artificial Sequence; identical to SEQ ID NO: 1117
  Synthetic polypeptide
  MOD_RES (2)..(2): Xaa is Aib
  MOD_RES (20)..(20): Xaa is Aib
  MISC_FEATURE (39)..(39): C-terminal amidation

SEQ ID NO: 1121 - protein, 40 aa, Artificial Sequence
  Synthetic polypeptide
  MOD_RES (2)..(2): Xaa is Aib
  MOD_RES (16)..(16): Xaa is Orn
  MOD_RES (20)..(20): Xaa is Aib
  MISC_FEATURE (40)..(40): C-terminal amidation
YXQGTFTSDYSIYLDXQAAXEFVNWLLAGGPSSGAPPPSC

SEQ ID NO: 1122 - protein, 40 aa, Artificial Sequence; identical to SEQ ID NO: 1121
  Synthetic polypeptide
  MOD_RES (2)..(2): Xaa is Aib
  MOD_RES (16)..(16): Xaa is 2,4-diaminobutyric acid
  MOD_RES (20)..(20): Xaa is Aib
  MISC_FEATURE (40)..(40): C-terminal amidation

SEQ ID NO: 1123 - protein, 40 aa, Artificial Sequence
  Synthetic polypeptide
  MOD_RES (2)..(2): Xaa is Aib
  MOD_RES (20)..(20): Xaa is Aib
  MISC_FEATURE (40)..(40): 14 Carbon fatty acyl group covalentaly attached to Lysine
  MISC_FEATURE (40)..(40): C-terminal amidation
YXQGTFTSDYSIYLDKQAAXEFVNWLLAGGPSSGAPPPSK

SEQ ID NO: 1124 - protein, 40 aa, Artificial Sequence; identical to SEQ ID NO: 1123
  Synthetic polypeptide
  MOD_RES (2)..(2): Xaa is Aib
  MOD_RES (20)..(20): Xaa is Aib
  MISC_FEATURE (40)..(40): 16 Carbon fatty acyl group covalently attached to Lysine
  MISC_FEATURE (40)..(40): C-terminal amidation

SEQ ID NO: 1125 - protein, 40 aa, Artificial Sequence; identical to SEQ ID NO: 1123
  Synthetic polypeptide
  MOD_RES (2)..(2): Xaa is Aib
  MOD_RES (20)..(20): Xaa is Aib
  MISC_FEATURE (40)..(40): 18 Carbon fatty acyl group covalently attached to Lysine
  MISC_FEATURE (40)..(40): C-terminal amidation

SEQ ID NO: 1126 - protein, 40 aa, Artificial Sequence; identical to SEQ ID NO: 1123
  Synthetic polypeptide
  MOD_RES (2)..(2): Xaa is Aib
  MOD_RES (20)..(20): Xaa is Aib
  MISC_FEATURE (40)..(40): C-terminal amidation

SEQ ID NO: 1127 - protein, 29 aa, Artificial Sequence
  Synthetic polypeptide
  MOD_RES (2)..(2): Xaa is Aib
  MOD_RES (20)..(20): Xaa is Aib
  MISC_FEATURE (24)..(24): PEG (40kDa) covalently attached to Cysteine
  MISC_FEATURE (29)..(29): C-terminal amidation
YXQGTFTSDYSIYLDKQAAXEFVCWLLAG

SEQ ID NO: 1128 - protein, 29 aa, Artificial Sequence
  Synthetic polypeptide
  MOD_RES (2)..(2): Xaa is Aib
  MISC_FEATURE (10)..(10): 14 Carbon fatty acyl group covalently attached to Lysine
  MOD_RES (20)..(20): Xaa is Aib
  MISC_FEATURE (29)..(29): C-terminal amidation
YXEGTFTSDKSIYLDKQAAXEFVNWLLAG

SEQ ID NO: 1129 - protein, 29 aa, Artificial Sequence
  Synthetic polypeptide
  MOD_RES (2)..(2): Xaa is Aib
  MISC_FEATURE (10)..(10): 16 Carbon fatty acyl group covalently attached to Lysine
  MOD_RES (20)..(20): Xaa is Aib
  MISC_FEATURE (29)..(29): C-terminal amidation
YXEGTFTSDKSIYLDKQAAXEFVNWLLAG

SEQ ID NO: 1130 - protein, 29 aa, Artificial Sequence
  Synthetic polypeptide
  MOD_RES (2)..(2): Xaa is Aib
  MISC_FEATURE (10)..(10): 18 Carbon fatty acyl group covalently attached to Lysine
  MOD_RES (20)..(20): Xaa is Aib
  MISC_FEATURE (29)..(29): C-terminal amidation
YXEGTFTSDKSIYLDKQAAXEFVNWLLAG

SEQ ID NO: 1131 - protein, 29 aa, Artificial Sequence
  Synthetic polypeptide
  MOD_RES (2)..(2): Xaa is Aib
  MOD_RES (20)..(20): Xaa is Aib
  MISC_FEATURE (29)..(29): C-terminal amidation
YXEGTFTSDKSIYLDKQAAXEFVNWLLAG

SEQ ID NO: 1132 - protein, 40 aa, Artificial Sequence
  Synthetic polypeptide
  MOD_RES (2)..(2): Xaa is Aib
  MOD_RES (20)..(20): Xaa is Aib
  MISC_FEATURE (40)..(40): 14 Carbon fatty acyl group covalently attached to Lysine
  MISC_FEATURE (40)..(40): C-terminal amidation
YXQGTFTSDYSIYLDKQAAXEFVCWLLAGGPSSGAPPPSK

SEQ ID NO: 1133 - protein, 40 aa, Artificial Sequence; identical to SEQ ID NO: 1132
  Synthetic polypeptide
  MOD_RES (2)..(2): Xaa is Aib
  MOD_RES (20)..(20): Xaa is Aib
  MISC_FEATURE (40)..(40): 16 Carbon fatty acyl group covalently attached to Lysine
  MISC_FEATURE (40)..(40): C-terminal amidation

SEQ ID NO: 1134 - protein, 40 aa, Artificial Sequence; identical to SEQ ID NO: 1132
  Synthetic polypeptide
  MOD_RES (2)..(2): Xaa is Aib
  MOD_RES (20)..(20): Xaa is Aib
  MISC_FEATURE (40)..(40): 18 Carbon fatty acyl group covalently attached to Lysine
  MISC_FEATURE (40)..(40): C-terminal amidation

SEQ ID NO: 1135 - protein, 40 aa, Artificial Sequence; identical to SEQ ID NO: 1132
  Synthetic polypeptide
  MOD_RES (2)..(2): Xaa is Aib
  MOD_RES (20)..(20): Xaa is Aib
  MISC_FEATURE (40)..(40): C-terminal amidation

SEQ ID NO: 1136 - protein, 40 aa, Artificial Sequence; identical to SEQ ID NO: 1132
  Synthetic polypeptide
  MOD_RES (2)..(2): Xaa is Aib
  MOD_RES (20)..(20): Xaa is Aib
  MISC_FEATURE (24)..(24): PEG (40kDa) covalently attached to Cysteine
  MISC_FEATURE (40)..(40): 14 Carbon fatty acyl group covalently attached to Lysine
  MISC_FEATURE (40)..(40): C-terminal amidation

SEQ ID NO: 1137 - protein, 40 aa, Artificial Sequence; identical to SEQ ID NO: 1132
  Synthetic polypeptide
  MOD_RES (2)..(2): Xaa is Aib
  MOD_RES (20)..(20): Xaa is Aib
  MISC_FEATURE (24)..(24): PEG (40kDa) covalently attached to Cysteine
  MISC_FEATURE (40)..(40): 16 Carbon fatty acyl group covalently attached to Lysine
  MISC_FEATURE (40)..(40): C-terminal amidation

SEQ ID NO: 1138 - protein, 40 aa, Artificial Sequence; identical to SEQ ID NO: 1132
  Synthetic polypeptide
  MOD_RES (2)..(2): Xaa is Aib
  MOD_RES (20)..(20): Xaa is Aib
  MISC_FEATURE (24)..(24): PEG (40kDa) covalently attached to Cysteine
  MISC_FEATURE (40)..(40): 18 Carbon fatty acyl group covalently attached to Lysine
  MISC_FEATURE (40)..(40): C-terminal amidation

SEQ ID NO: 1139 - protein, 40 aa, Artificial Sequence; identical to SEQ ID NO: 1132
  Synthetic polypeptide
  MOD_RES (2)..(2): Xaa is Aib
  MOD_RES (20)..(20): Xaa is Aib
  MISC_FEATURE (24)..(24): PEG (40kDa) covalently attached to Cysteine
  MISC_FEATURE (40)..(40): C-terminal amidation

SEQ ID NO: 1140 - protein, 40 aa, Artificial Sequence; identical to SEQ ID NO: 1099
  Synthetic polypeptide
  MOD_RES (2)..(2): Xaa is Aib
  MOD_RES (20)..(20): Xaa is Aib
  MISC_FEATURE (40)..(40): PEG (40kDa) covalently attached to Cysteine
  MISC_FEATURE (40)..(40): C-terminal amidation

SEQ ID NO: 1141 - protein, 40 aa, Artificial Sequence; identical to SEQ ID NO: 1100
  Synthetic polypeptide
  MOD_RES (2)..(2): Xaa is Aib
  MOD_RES (20)..(20): Xaa is Aib
  MISC_FEATURE (40)..(40): 16 Carbon fatty acyl group covalently attached to Lysine
  MISC_FEATURE (40)..(40): C-terminal amidation

SEQ ID NO: 1142 - protein, 40 aa, Artificial Sequence
  Synthetic polypeptide
  MOD_RES (2)..(2): Xaa is Aib
  MOD_RES (20)..(20): Xaa is Aib
  MISC_FEATURE (40)..(40): 16 Carbon fatty acyl group covalently attached to Lysine
  MISC_FEATURE (40)..(40): C-terminal amidation
YXQGTFTSDYSIYLDKQAAXEFVCWLMNGGPSSGAPPPSK

SEQ ID NO: 1143 - protein, 40 aa, Artificial Sequence; identical to SEQ ID NO: 1142
  Synthetic polypeptide
  MOD_RES (2)..(2): Xaa is Aib
  MOD_RES (20)..(20): Xaa is Aib
  MISC_FEATURE (24)..(24): PEG (40kDa) covalently attached to Cysteine
  MISC_FEATURE (40)..(40): 16 Carbon fatty acyl group covalently attached to Lysine
  MISC_FEATURE (40)..(40): C-terminal amidation

SEQ ID NO: 1144 - protein, 40 aa, Artificial Sequence; identical to SEQ ID NO: 1100
  Synthetic polypeptide
  MOD_RES (2)..(2): Xaa is Aib
  MOD_RES (20)..(20): Xaa is Aib
  MISC_FEATURE (40)..(40): 14 Carbon fatty acyl group covalently attached to Lysine
  MISC_FEATURE (40)..(40): C-terminal amidation

SEQ ID NO: 1145 - protein, 40 aa, Artificial Sequence; identical to SEQ ID NO: 1100
  Synthetic polypeptide
  MOD_RES (2)..(2): Xaa is Aib
  MOD_RES (20)..(20): Xaa is Aib
  MISC_FEATURE (40)..(40): 18 Carbon fatty acyl group covalently attached to Lysine
  MISC_FEATURE (40)..(40): C-terminal amidation

SEQ ID NO: 1146 - protein, 40 aa, Artificial Sequence; identical to SEQ ID NO: 1100
  Synthetic polypeptide
  MOD_RES (2)..(2): Xaa is Aib
  MOD_RES (20)..(20): Xaa is Aib
  MISC_FEATURE (40)..(40): C-terminal amidation

SEQ ID NO: 1147 - protein, 40 aa, Artificial Sequence; identical to SEQ ID NO: 1104
  Synthetic polypeptide
  MOD_RES (2)..(2): Xaa is Aib
  MOD_RES (20)..(20): Xaa is Aib
  MISC_FEATURE (40)..(40): 3-SH-propionic acyl group covalently attached to Lysine
  MISC_FEATURE (40)..(40): C-terminal amidation

SEQ ID NO: 1148 - protein, 40 aa, Artificial Sequence; identical to SEQ ID NO: 1123
  Synthetic polypeptide
  MOD_RES (2)..(2): Xaa is Aib
  MOD_RES (20)..(20): Xaa is Aib
  MISC_FEATURE (40)..(40): 8 Carbon fatty acyl group covalently attached to Lysine
  MISC_FEATURE (40)..(40): C-terminal amidation

SEQ ID NO: 1149 - protein, 40 aa, Artificial Sequence
  Synthetic polypeptide
  MOD_RES (2)..(2): Xaa is Aib
  MOD_RES (20)..(20): Xaa is Aib
  MISC_FEATURE (40)..(40): C-terminal amidation
YXQGTFSSDYSIYLDKQAAXEFVNWLLAGGPSSGAPPPSC

SEQ ID NO: 1150 - protein, 40 aa, Artificial Sequence
  Synthetic polypeptide
  MOD_RES (2)..(2): Xaa is Aib
  MOD_RES (7)..(7): Xaa is 2-aminobutyric acid
  MOD_RES (20)..(20): Xaa is Aib
  MISC_FEATURE (40)..(40): C-terminal amidation
YXQGTFXSDYSIYLDKQAAXEFVNWLLAGGPSSGAPPPSC

SEQ ID NO: 1151 - protein, 40 aa, Artificial Sequence; identical to SEQ ID NO: 1132
  Synthetic polypeptide
  MOD_RES (2)..(2): Xaa is Aib
  MOD_RES (20)..(20): Xaa is Aib
  MISC_FEATURE (40)..(40): 8 Carbon fatty acyl group covalently attached to Lysine
  MISC_FEATURE (40)..(40): C-terminal amidation

SEQ ID NO: 1152 - protein, 40 aa, Artificial Sequence; identical to SEQ ID NO: 1100
  Synthetic polypeptide
  MOD_RES (2)..(2): Xaa is Aib
  MOD_RES (20)..(20): Xaa is Aib
  MISC_FEATURE (40)..(40): 8 Carbon fatty acyl group covalently attached to Lysine
  MISC_FEATURE (40)..(40): C-terminal amidation

SEQ ID NO: 1153 - protein, 40 aa, Artificial Sequence; identical to SEQ ID NO: 1100
  Synthetic polypeptide
  MOD_RES (2)..(2): Xaa is Aib
  MOD_RES (20)..(20): Xaa is Aib
  MISC_FEATURE (24)..(24): PEG (40kDa) covalently attached to Cysteine
  MISC_FEATURE (40)..(40): C-terminal amidation

SEQ ID NO: 1154 - protein, 40 aa, Artificial Sequence
  Synthetic polypeptide
  MOD_RES (2)..(2): Xaa is Aib
  MOD_RES (20)..(20): Xaa is Aib
  MOD_RES (40)..(40): Xaa is d-Lysine
  MISC_FEATURE (40)..(40): 14 Carbon fatty acyl group covalently attached to d-Lysine
  MISC_FEATURE (40)..(40): C-terminal amidation
YXEGTFTSDYSIYLDKQAAXEFVCWLLAGGPSSGAPPPSX

SEQ ID NO: 1155 - protein, 40 aa, Artificial Sequence; identical to SEQ ID NO: 1154
  Synthetic polypeptide
  MOD_RES (2)..(2): Xaa is Aib
  MOD_RES (20)..(20): Xaa is Aib
  MOD_RES (40)..(40): Xaa is d-Lysine
  MISC_FEATURE (40)..(40): C-terminal amidation

SEQ ID NO: 1156 - protein, 40 aa, Artificial Sequence; identical to SEQ ID NO: 1154
  Synthetic polypeptide
  MOD_RES (2)..(2): Xaa is Aib
  MOD_RES (20)..(20): Xaa is Aib
  MISC_FEATURE (24)..(24): PEG (40kDa) covalently attached to Cysteine
  MOD_RES (40)..(40): Xaa is d-Lysine
  MISC_FEATURE (40)..(40): 14 Carbon fatty acyl group covalently attached to Lysine
  MISC_FEATURE (40)..(40): C-terminal amidation

SEQ ID NO: 1157 - protein, 40 aa, Artificial Sequence; identical to SEQ ID NO: 1154
  Synthetic polypeptide
  MOD_RES (2)..(2): Xaa is Aib
  MOD_RES (20)..(20): Xaa is Aib
  MISC_FEATURE (24)..(24): PEG (40kDa) covalently attached to Cysteine
  MISC_FEATURE (40)..(40): Xaa is d-Lysine
  MISC_FEATURE (40)..(40): C-terminal amidation

SEQ ID NO: 1158 - protein, 39 aa, Artificial Sequence
  Synthetic polypeptide
  MOD_RES (2)..(2): Xaa is Aib
  MISC_FEATURE (10)..(10): 14 Carbon fatty acyl group covalently attached to Lysine
  MOD_RES (20)..(20): Xaa is Aib
  MISC_FEATURE (40)..(40): C-terminal amidation
YXEGTFTSDKSIYLDKQAAXEFVCWLLAGGPSSGAPPPS

SEQ ID NO: 1159 - protein, 39 aa, Artificial Sequence; identical to SEQ ID NO: 1158
  Synthetic polypeptide
  MOD_RES (2)..(2): Xaa is Aib
  MOD_RES (20)..(20): Xaa is Aib
  MISC_FEATURE (40)..(40): C-terminal amidation

SEQ ID NO: 1160 - protein, 41 aa, Artificial Sequence
  Synthetic polypeptide
  MOD_RES (2)..(2): Xaa is Aib
  MOD_RES (20)..(20): Xaa is Aib
  MISC_FEATURE (40)..(40): 14 Carbon fatty acyl group covalently attached to Lysine
  MISC_FEATURE (41)..(41): C-terminal amidation
YXEGTFTSDYSIYLDKQAAXEFVNWLLAGGPSSGAPPPSKC

SEQ ID NO: 1161 - protein, 41 aa, Artificial Sequence; identical to SEQ ID NO: 1160
  Synthetic polypeptide
  MOD_RES (2)..(2): Xaa is Aib
  MOD_RES (20)..(20): Xaa is Aib
  MISC_FEATURE (41)..(41): C-terminal amidation

SEQ ID NO: 1162 - protein, 39 aa, Artificial Sequence; identical to SEQ ID NO: 1158
  Synthetic polypeptide
  MOD_RES (2)..(2): Xaa is Aib
  MISC_FEATURE (10)..(10): 14 Carbon fatty acyl group covalently attached to Lysine
  MOD_RES (20)..(20): Xaa is Aib
  MISC_FEATURE (24)..(24): PEG (40kDa) covalently attached to Cysteine
  MISC_FEATURE (39)..(39): C-terminal amidation

SEQ ID NO: 1163 - protein, 41 aa, Artificial Sequence; identical to SEQ ID NO: 1160
  Synthetic polypeptide
  MOD_RES (2)..(2): Xaa is Aib
  MOD_RES (20)..(20): Xaa is Aib
  MISC_FEATURE (40)..(40): 14 Carbon fatty acyl group covalently attached to Lysine
  MISC_FEATURE (41)..(41): PEG (40kDa) covalently attached to Cysteine
  MISC_FEATURE (41)..(41): C-terminal amidation

SEQ ID NO: 1164 - protein, 41 aa, Artificial Sequence; identical to SEQ ID NO: 1160
  Synthetic polypeptide
  MOD_RES (2)..(2): Xaa is Aib
  MOD_RES (20)..(20): Xaa is Aib
  MISC_FEATURE (41)..(41): PEG (40kDa) covalently attached to Cysteine
  MISC_FEATURE (41)..(41): C-terminal amidation

SEQ ID NO: 1165 - protein, 40 aa, Artificial Sequence
  Synthetic polypeptide
  MOD_RES (2)..(2): Xaa is Aib
  MISC_FEATURE (40)..(40): 14 Carbon fatty acyl group covalently attached to Lysine
  MISC_FEATURE (40)..(40): C-terminal amidation
HXQGTFTSDYSKYLDEQAAKEFICWLMNGGPSSGAPPPSK

SEQ ID NO: 1166 - protein, 40 aa, Artificial Sequence; identical to SEQ ID NO: 1100
  Synthetic polypeptide
  MOD_RES (2)..(2): Xaa is Aib
  MOD_RES (20)..(20): Xaa is Aib
  MISC_FEATURE (24)..(24): PEG (40kDa) covalently attached to Cysteine
  MISC_FEATURE (40)..(40): 14 Carbon fatty acyl group covalently attached to Lysine
  MISC_FEATURE (40)..(40): C-terminal amidation

SEQ ID NO: 1167 - protein, 40 aa, Artificial Sequence
  Synthetic polypeptide
  MOD_RES (2)..(2): Xaa is Aib
  MOD_RES (16)..(16): Xaa is Aib
  MISC_FEATURE (40)..(40): C-terminal amidation
YXQGTFTSDYSIYLDXQAAKEFVNWLLAGGPSSGAPPPSC

SEQ ID NO: 1168 - protein, 40 aa, Artificial Sequence
  Synthetic polypeptide
  MOD_RES (2)..(2): Xaa is Aib
  MOD_RES (16)..(16): Xaa is Aib
  MISC_FEATURE (40)..(40): C-terminal amidation
YXQGTFTSDYSIYLDXQAAQEFVNWLLAGGPSSGAPPPSC

SEQ ID NO: 1169 - protein, 40 aa, Artificial Sequence
  Synthetic polypeptide
  MOD_RES (2)..(2): Xaa is Aib
  MOD_RES (12)..(16): Lactam bridge between residues 12 and 16
  MOD_RES (20)..(20): Xaa is Aib
  MOD_RES (40)..(40): C-terminal amidation
YXQGTFTSDYSKYLDEQAAXEFVNWLLAGGPSSGAPPPSC

SEQ ID NO: 1170 - protein, 10 aa, Artificial Sequence
  Synthetic polypeptide
GPSSGAPPPK

SEQ ID NO: 1171 - protein, 11 aa, Artificial Sequence
  Synthetic polypeptide
  MOD_RES (1)..(1): Xaa is Gly or a small, aliphatic or non-polar or slightly polar amino acid
XGPSSGAPPPK

SEQ ID NO: 1172 - protein, 12 aa, Artificial Sequence
  Synthetic  polypeptide
  MOD_RES (1)..(1): Xaa is Gly or a small, aliphatic or non-polar or slightly polar amino acid
XGPSSGAPPPSK

SEQ ID NO: 1173 - protein, 40 aa, Artificial Sequence; identical to SEQ ID NO: 1167
  Synethic polypeptide
  MOD_RES (2)..(2): Xaa is Aib
  MOD_RES (16)..(16): Xaa is Aib
  MISC_FEATURE (40)..(40): PEG (40kDa) covalently attached to Cysteine
  MISC_FEATURE (40)..(40): C-terminal amidation

SEQ ID NO: 1174 - protein, 40 aa, Artificial Sequence; identical to SEQ ID NO: 1168
  Synthetic polypeptide
  MOD_RES (2)..(2): Xaa is Aib
  MOD_RES (16)..(16): Xaa is Aib
  MISC_FEATURE (40)..(40): PEG (40kDa) covalently attached to Cysteine
  MISC_FEATURE (40)..(40): C-terminal amidation

SEQ ID NO: 1175 - protein, 40 aa, Artificial Sequence; identical to SEQ ID NO: 1121
  Synthetic polypeptide
  MOD_RES (2)..(2): Xaa is Aib
  MOD_RES (16)..(16): Xaa is Aib
  MOD_RES (20)..(20): Xaa is Aib
  MISC_FEATURE (40)..(40): C-terminal amidation

SEQ ID NO: 1176 - protein, 40 aa, Artificial Sequence
  Synthetic polypeptide
  MOD_RES (2)..(2): Xaa is Aib
  MOD_RES (20)..(20): Xaa is Aib
  MISC_FEATURE (40)..(40): C-terminal amidation
YXQGTFTSDYSIYLDEQAAXEFVNWLLAGGPSSGAPPPSC

SEQ ID NO: 1177 - protein, 29 aa, Artificial Sequence
  Synthetic polypeptide
  MOD_RES (2)..(2): Xaa is Aib
  MOD_RES (20)..(20): Xaa is Aib
  MISC_FEATURE (29)..(29): C-terminal amidation
YXQGTFTSDYSIYLDEQAAXEFVCWLLAG

SEQ ID NO: 1178 - protein, 29 aa, Artificial Sequence
  Synthetic polypeptide
  MISC_FEATURE: C-terminal amidation
  MOD_RES (2)..(2): Xaa is Aib
  MOD_RES (20)..(20): Xaa is Aib
YXQGTFTSDYSIYLDSQAAXEFVCWLLAG

SEQ ID NO: 1179 - protein, 30 aa, Artificial Sequene
  Synthetic polypeptide
  MOD_RES (2)..(2): Xaa is Aib
  MISC_FEATURE (24)..(24): PEG (40kDa) covalently attached to Cysteine
HXEGTFTSDVSSYLEEQAAKEFICWLVKGR

SEQ ID NO: 1180 - protein, 42 aa, Artificial Sequence
  Synthetic polypeptide
  MISC_FEATURE (24)..(24): Substituted amino acid covalently linked to hydrophilic group
YAPGTFISDYSIAMDKIHQQDFVXWLLAQKGKKNWLKHNITQ

SEQ ID NO: 1181 - protein, 40 aa, Artificial Sequence
  Synthetic polypeptide
  MOD_RES (2)..(2): Xaa is Aib
  MISC_FEATURE (16)..(20): Lactam bridge between residues 16 and 20
  MISC_FEATURE (40)..(40): Substituted amino acid covalentaly linked to hydrophilic group
YXQGTFTSDYSIYLDEQAAKEFVNWLLAGGPSSGAPPPSX

SEQ ID NO: 1182 - protein, 29 aa, Artificial Sequence
  Synthetic polypeptide
  MOD_RES (2)..(2): Xaa is Aib
  MISC_FEATURE (16)..(20): Lactam bridge between residues 16 and 20
  MISC_FEATURE (24)..(24): Substituted amino acid covalently linked to hydrophilic group
  misc_feature (29)..(29): Xaa can be any naturally occurring amino acid
YXQGTFTSDYSIYLDEQAAKEFVXWLLAX

SEQ ID NO: 1183 - protein, 39 aa, Artificial Sequence
  Synthetic polypeptide
  MOD_RES (2)..(2): Xaa is Aib
  MISC_FEATURE (16)..(20): Lactam bridge between residues 16 and 20
  MISC_FEATURE (24)..(24): Substituted amino acid covalently linked to hydrophilic group
YXQGTFTSDYSIYLDEQAAKEFVXWLLAGGPSSGAPPPS

SEQ ID NO: 1184 - protein, 40 aa, Artificial Sequence
  Synthetic polypeptide
  MOD_RES (2)..(2): Xaa is Aib
  MISC_FEATURE (16)..(20): Lactam bridge between residues 16 and 20
  MISC_FEATURE (40)..(40): Substituted amino acid covalently linked to hydrophilic group
YXEGTFTSDYSIYLDEQAAKEFVNWLLAGGPSSGAPPPSX

SEQ ID NO: 1185 - protein, 29 aa, Artificial Sequence
  Sythetic polypeptide
  MOD_RES (2)..(2): Xaa is Aib
  MISC_FEATURE (16)..(20): Lactam bridge between residues 16 and 20
  MISC_FEATURE (24)..(24): Substituted amino acid covalently linked to hydrophilic group
YXQGTFISDYSIYLDEQAAKEFVXWLLAG

SEQ ID NO: 1186 - protein, 40 aa, Artificial Sequence
  Synthetic polypeptide
  MOD_RES (2)..(2): Xaa is Aib
  MISC_FEATURE (16)..(20): Lactam bridge between residues 16 and 20
  MISC_FEATURE (40)..(40): Substituted amino acid covalently linked to hydrophilic group
YXQGTFISDYSIYLDEQAAKEFVNWLLAGGPSSGAPPPSX

SEQ ID NO: 1187 - protein, 29 aa, Artificial sequence
  Synthetic polypeptide
  MOD_RES (2)..(2): Xaa is Aib
  MISC_FEATURE (16)..(20): Lactam bridge between residues 16 and 20
  MISC_FEATURE (24)..(24): Substituted amino acid covalently linked to hydrophilic group
YXQGTFTSDYSIYLDEQAAKEFVXWLMNG

SEQ ID NO: 1188 - protein, 40 aa, Artificial sequence
  Synthetic polypeptide
  MOD_RES (2)..(2): Xaa is Aib
  MISC_FEATURE (16)..(20): Lactam bridge between residues 16 and 20
  MISC_FEATURE (40)..(40): Substitute amino acid covalently linked to hydrophilic group
YXQGTFVSDYSIYLDEQAAKEFVNWLLAGGPSSGAPPPSX

SEQ ID NO: 1189 - protein, 40 aa, Artificial sequence
  Synthetic polypeptide
  MOD_RES (2)..(2): Xaa is Aib
  MISC_FEATURE (16)..(20): Lactam bridge between residues 16 and 20
  MOD_RES (27)..(27): Xaa is Nle
  MISC_FEATURE (40)..(40): Substituted amino acid covalently linked to hydrophilic group
YXQGTFTSDYSIYLDEQAAKEFVNWLXAGGPSSGAPPPSX

SEQ ID NO: 1190 - protein, 40 aa, Artificial sequence
  Synthetic polypeptide
  MOD_RES (2)..(2): Xaa is Aib
  MISC_FEATURE (16)..(20): Lactam bridge between residues 16 and 20
  MISC_FEATURE (40)..(40): Substituted amino acid covalently linked to hydrophilic group
YXEGTFTSDYSIYLDEQAAKEFVNWLLAGRPSSGAPPPSX

SEQ ID NO: 1191 - protein, 43 aa, Artificial sequence
  Synthetic polypeptide
  MOD_RES (2)..(2): Xaa is Aib
  MISC_FEATURE (16)..(20): Lactam bridge between residues 16 and 20
  MISC_FEATURE (43)..(43): Substituted amino acid covalently linked to hydrophilic group
YXEGTFTSDYSIYLDEQAAKEFVNWLLAGKGKKNWLKHNITQX

SEQ ID NO: 1192 - protein, 40 aa, Artificial Sequence
  Synthetic polypeptide
  MOD_RES (2)..(2): Xaa is Aib
  MOD_RES (20)..(20): Xaa is Aib
  MISC_FEATURE (40)..(40): Substituted amino acid covalently linked to hydrophilic group
  MISC_FEATURE (40)..(40): C-terminal amidation
YXEGTFTSDYSIYLDKQAAXEFVNWLLAGGPSSGAPPPSX

SEQ ID NO: 1193 - protein, 40 aa, Artificial Sequence
  Synthetic polypeptide
  MOD_RES (2)..(2): Xaa is Aib
  MOD_RES (20)..(20): Xaa is Aib
  MISC_FEATURE (24)..(24): Substituted amino acid covalently linked to hydrophilic group
  MISC_FEATURE (40)..(40): C-terminal amidation
YXEGTFTSDYSIYLDKQAAXEFVXWLLAGGPSSGAPPPSK

SEQ ID NO: 1194 - protein, 40 aa, Artificial Sequence
  Synthetic polypeptide
  MOD_RES (2)..(2): Xaa is Aib
  MOD_RES (20)..(20): Xaa is Aib
  MISC_FEATURE (24)..(24): Substituted amino acid covalently linked to hydrophilic group
  MISC_FEATURE (40)..(40): Substitute amino acid covalently linked to an acyl or alkyl group
  MISC_FEATURE (40)..(40): C-terminal amidation
YXEGTFTSDYSIYLDKQAAXEFVXWLLAGGPSSGAPPPSX

SEQ ID NO: 1195 - protein, 40 aa, Artificial Sequence; identical to SEQ ID NO: 1192
  Synthetic polypeptide
  MOD_RES (2)..(2): Xaa is Aib
  MOD_RES (20)..(20): Xaa is Aib
  MISC_FEATURE (40)..(40): Substituted amino acid covalently linked to an acyl or alkyl group
  MISC_FEATURE (40)..(40): C-terminal amidation

SEQ ID NO: 1196 - protein, 40 aa, Artificial Sequence
  Synthetic polypeptide
  MOD_RES (2)..(2): Xaa is Aib
  MOD_RES (20)..(20): Xaa is Aib
  MISC_FEATURE (40)..(40): Substituted amino acid covalently linked to hydrophilic group
  MISC_FEATURE (40)..(40): C-terminal amidation
YXQGTFTSDYSIYLDKQAAXEFVNWLLAGGPSSGAPPPSX

SEQ ID NO: 1197 - protein, 39 aa, Artificial Sequence
  Synthetic polypeptide
  MOD_RES (2)..(2): Xaa is Aib
  MOD_RES (20)..(20): Xaa is Aib
  MISC_FEATURE (24)..(24): Substituted amino acid covalently linked to acyl or alkyl group
  MISC_FEATURE (39)..(39): C-terminal amidation
YXEGTFTSDYSIYLDKQAAXEFVXWLLAGGPSSGAPPPS

SEQ ID NO: 1198 - protein, 39 aa, Artificial Sequence
  Synthetic polypeptide
  MOD_RES (2)..(2): Xaa is Aib
  MISC_FEATURE (10)..(10): Substituted amino acid covalently linked to acyl or alkyl group
  MOD_RES (20)..(20): Xaa is Aib
  MISC_FEATURE (39)..(39): C-terminal amidation
YXEGTFTSDXSIYLDKQAAXEFVNWLLAGGPSSGAPPPS

SEQ ID NO: 1199 - protein, 40 aa, Artificial Sequence; identical to SEQ ID NO: 1196
  Synthetic polypeptide
  MOD_RES (2)..(2): Xaa is Aib
  MOD_RES (20)..(20): Xaa is Aib
  MISC_FEATURE (40)..(40): Substituted amino acid covalently linked to acyl or alkyl group
  MISC_FEATURE (40)..(40): C-terminal amidation

SEQ ID NO: 1200 - protein, 29 aa, Artificial Sequence
  Synthetic polypeptide
  MOD_RES (2)..(2): Xaa is Aib
  MOD_RES (20)..(20): Xaa is Aib
  MISC_FEATURE (24)..(24): Substituted amino acid covalently linked to hydrophilic group
  MISC_FEATURE (29)..(29): C-terminal amidation
YXQGTFTSDYSIYLDKQAAXEFVXWLLAG

SEQ ID NO: 1201 - protein, 29 aa, Artificial Sequence
  Synthetic polypeptide
  MOD_RES (2)..(2): Xaa is Aib
  MISC_FEATURE (10)..(10): Substituted amino acid covalently linked to acyl or alkyl group
  MOD_RES (20)..(20): Xaa is Aib
  MISC_FEATURE (29)..(29): C-terminal amidation
YXEGTFTSDXSIYLDKQAAXEFVNWLLAG

SEQ ID NO: 1202 - protein, 40 aa, Artificial Sequence
  Synthetic polypeptide
  MOD_RES (2)..(2): Xaa is Aib
  MOD_RES (20)..(20): Xaa is Aib
  MISC_FEATURE (40)..(40): Substituted amino acid covalently linked acyl or alkyl group
  MISC_FEATURE (40)..(40): C-terminal amidation
YXQGTFTSDYSIYLDKQAAXEFVCWLLAGGPSSGAPPPSX

SEQ ID NO: 1203 - protein, 40 aa, Artificial Sequence
  Synthetic polypeptide
  MOD_RES (2)..(2): Xaa is Aib
  MOD_RES (20)..(20): Xaa is Aib
  MISC_FEATURE (24)..(24): Substituted amino acid covalently linked to hydrophilic group
  MISC_FEATURE (40)..(40): Substituted amino acid covalently linked to acyl or alkyl group
  MISC_FEATURE (40)..(40): C-terminal amidation
YXQGTFTSDYSIYLDKQAAXEFVXWLLAGGPSSGAPPPSX

SEQ ID NO: 1204 - protein, 40 aa, Artificial Sequence
  Synthetic polypeptide
  MOD_RES (2)..(2): Xaa is Aib
  MOD_RES (20)..(20): Xaa is Aib
  MISC_FEATURE (24)..(24): Substituted amino acid covalently linked to hydrophilic group
  MISC_FEATURE (40)..(40): C-terminal amidation
YXQGTFTSDYSIYLDKQAAXEFVXWLLAGGPSSGAPPPSK

SEQ ID NO: 1205 - protein, 40 aa, Artificial Sequence; identical to SEQ ID NO: 1192
  Synthetic polypeptide
  MOD_RES (2)..(2): Xaa is Aib
  MOD_RES (20)..(20): Xaa is Aib
  MISC_FEATURE (40)..(40): Substituted amino acid covalently linked to hydrophilic group
  MISC_FEATURE (40)..(40): C-terminal amidation

SEQ ID NO: 1206 - protein, 40 aa, Artificial Sequence; identical to SEQ ID NO: 1154
  Synthetic polypeptide
  MOD_RES (2)..(2): Xaa is Aib
  MOD_RES (20)..(20): Xaa is Aib
  MISC_FEATURE (40)..(40): Substituted amino acid covalently linked to acyl or alkyl group
  MISC_FEATURE (40)..(40): C-terminal amidation

SEQ ID NO: 1207 - protein, 40 aa, Artificial Sequence
  Synthetic polypeptide
  MOD_RES (2)..(2): Xaa is Aib
  MOD_RES (20)..(20): Xaa is Aib
  MISC_FEATURE (40)..(40): Substituted amino acid covalently linked to acyl or alkyl group
  MISC_FEATURE (40)..(40): C-terminal amidation
YXQGTFTSDYSIYLDKQAAXEFVCWLMNGGPSSGAPPPSX

SEQ ID NO: 1208 - protein, 40 aa, Artificial Sequence
  Synthetic polypeptide
  MOD_RES (2)..(2): Xaa is Aib
  MOD_RES (20)..(20): Xaa is Aib
  MISC_FEATURE (24)..(24): Substituted amino acid covalently linked to hydrophilic group
  MISC_FEATURE (40)..(40): Substituted amino acid covalently linked to acyl or alkyl group
  MISC_FEATURE (40)..(40): C-terminal amidation
YXQGTFTSDYSIYLDKQAAXEFVXWLMNGGPSSGAPPPSX

SEQ ID NO: 1209 - protein, 40 aa, Artificial Sequence; identical to SEQ ID NO: 1154
  Synthetic polypeptide
  MOD_RES (2)..(2): Xaa is Aib
  MOD_RES (20)..(20): Xaa is Aib
  MISC_FEATURE (40)..(40): Substituted amino acid covalently linked to acyl or alkyl group
  MISC_FEATURE (40)..(40): C-terminal amidation

SEQ ID NO: 1210 - protein, 40 aa, Artificial Sequence; identical to SEQ ID NO: 1196
  Synthetic polypeptide
  MOD_RES (2)..(2): Xaa is Aib
  MOD_RES (20)..(20): Xaa is Aib
  MISC_FEATURE (40)..(40): Substituted amino acid covalently linked to acyl or alkyl group
  MISC_FEATURE (40)..(40): C-terminal amidation

SEQ ID NO: 1211 - protein, 40 aa, Artificial Sequence; identical to SEQ ID NO: 1202
  Synthetic polypeptide
  MOD_RES (2)..(2): Xaa is Aib
  MOD_RES (20)..(20): Xaa is Aib
  MISC_FEATURE (40)..(40): Substituted amino acid covalently linked to acyl or alkyl group
  MISC_FEATURE (40)..(40): C-terminal amidation

SEQ ID NO: 1212 - protein, 40 aa, Artificial Sequence; identical to SEQ ID NO: 1154
  Synthetic polypeptide
  MOD_RES (2)..(2): Xaa is Aib
  MOD_RES (20)..(20): Xaa is Aib
  MISC_FEATURE (40)..(40): Substituted amino acid covalently linked to acyl or alkyl group
  MISC_FEATURE (40)..(40): C-terminal amidation

SEQ ID NO: 1213 - protein, 40 aa, Artificial Sequence; identical to SEQ ID NO: 1193
  Synthetic polypeptide
  MOD_RES (2)..(2): Xaa is Aib
  MOD_RES (20)..(20): Xaa is Aib
  MISC_FEATURE (24)..(24): Substituted amino acid covalently linked to hydrophilic group
  MISC_FEATURE (40)..(40): C-terminal amidation

SEQ ID NO: 1214 - protein, 40 aa, Artificial Sequence; identical to SEQ ID NO: 1154
  Synthetic polypeptide
  MOD_RES (2)..(2): Xaa is Aib
  MOD_RES (20)..(20): Xaa is Aib
  MISC_FEATURE (40)..(40): Substituted amino acid covalently linked to acyl or alkyl group
  MISC_FEATURE (40)..(40): C-terminal amidation

SEQ ID NO: 1215 - protein, 40 aa, Artificial Sequence; identical to SEQ ID NO: 1194
  Synthetic polypeptide
  MOD_RES (2)..(2): Xaa is Aib
  MOD_RES (20)..(20): Xaa is Aib
  MISC_FEATURE (24)..(24): Substituted amino acid covalently linked to hydrophilic group
  MISC_FEATURE (40)..(40): Substituted amino acid covalently linked to acyl or alkyl group
  MISC_FEATURE (40)..(40): C-terminal amidation

SEQ ID NO: 1216 - protein, 40 aa, Artificial Sequence; identical to SEQ ID NO: 1194
  Synthetic polypeptide
  MOD_RES (2)..(2): Xaa is Aib
  MOD_RES (20)..(20): Xaa is Aib
  MISC_FEATURE (24)..(24): Substituted amino acid covalently linked to hydrophilic group
  MISC_FEATURE (40)..(40): C-terminal amidation

SEQ ID NO: 1217 - protein, 39 aa, Artificial Sequence
  Synthetic polypeptide
  MOD_RES (2)..(2): Xaa is Aib
  MISC_FEATURE (10)..(10): Substituted amino acid covalently linked to acyl or alkyl group
  MOD_RES (20)..(20): Xaa is Aib
  MISC_FEATURE (40)..(40): C-terminal amidation
YXEGTFTSDXSIYLDKQAAXEFVCWLLAGGPSSGAPPPS

SEQ ID NO: 1218 - protein, 41 aa, Artificial Sequence
  Synthetic polypeptide
  MOD_RES (2)..(2): Xaa is Aib
  MOD_RES (20)..(20): Xaa is Aib
  MISC_FEATURE (40)..(40): Substituted amino acid covalently linked to acyl or alkyl group
  MISC_FEATURE (41)..(41): C-terminal amidation
YXEGTFTSDYSIYLDKQAAXEFVNWLLAGGPSSGAPPPSXC

SEQ ID NO: 1219 - protein, 39 aa, Artificial Sequence
  Synthetic polypeptide
  MOD_RES (2)..(2): Xaa is Aib
  MISC_FEATURE (10)..(10): Substituted amino acid covalently linked to acyl or alkyl group
  MOD_RES (20)..(20): Xaa is Aib
  MISC_FEATURE (24)..(24): Substituted amino acid covalently linked to hydrophilic group
  MISC_FEATURE (39)..(39): C-terminal amidation
YXEGTFTSDXSIYLDKQAAXEFVXWLLAGGPSSGAPPPS

SEQ ID NO: 1220 - protein, 41 aa, Artificial Sequence
  Synthetic polypeptide
  MOD_RES (2)..(2): Xaa is Aib
  MOD_RES (20)..(20): Xaa is Aib
  MISC_FEATURE (40)..(40): Substituted amino acid covalently linked to acyl or alkyl group
  MISC_FEATURE (41)..(41): Substituted amino acid covalently linked to hydrophilic group
  MISC_FEATURE (41)..(41): C-terminal amidation
YXEGTFTSDYSIYLDKQAAXEFVNWLLAGGPSSGAPPPSXX

SEQ ID NO: 1221 - protein, 41 aa, Artificial Sequence
  Synthetic polypeptide
  MOD_RES (2)..(2): Xaa is Aib
  MOD_RES (20)..(20): Xaa is Aib
  MISC_FEATURE (41)..(41): Substituted amino acid covalently linked to hydrophilic group
  MISC_FEATURE (41)..(41): C-terminal amidation
YXEGTFTSDYSIYLDKQAAXEFVNWLLAGGPSSGAPPPSKX

SEQ ID NO: 1222 - protein, 40 aa, Artificial Sequence
  Synthetic polypeptide
  MOD_RES (2)..(2): Xaa is Aib
  MISC_FEATURE (40)..(40): Substituted amino acid covalently linked to acyl or alkyl group
  MISC_FEATURE (40)..(40): C-terminal amidation
HXQGTFTSDYSKYLDEQAAKEFICWLMNGGPSSGAPPPSX

SEQ ID NO: 1223 - protein, 40 aa, Artificial Sequence; identical to SEQ ID NO: 1194
  Synthetic polypeptide
  MOD_RES (2)..(2): Xaa is Aib
  MOD_RES (20)..(20): Xaa is Aib
  MISC_FEATURE (24)..(24): Substituted amino acid covalently linked to hydrophilic group
  MISC_FEATURE (40)..(40): Substituted amino acid covalently linked to acyl or alkyl group
  MISC_FEATURE (40)..(40): C-terminal amidation

SEQ ID NO: 1224 - protein, 40 aa, Artificial Sequence
  Synethic polypeptide
  MOD_RES (2)..(2): Xaa is Aib
  MOD_RES (16)..(16): Xaa is Aib
  MISC_FEATURE (40)..(40): Substituted amino acid covalently linked to hydrophilic group
  MISC_FEATURE (40)..(40): C-terminal amidation
YXQGTFTSDYSIYLDXQAAKEFVNWLLAGGPSSGAPPPSX

SEQ ID NO: 1225 - protein, 40 aa, Artificial Sequence
  Synthetic polypeptide
  MOD_RES (2)..(2): Xaa is Aib
  MOD_RES (16)..(16): Xaa is Aib
  MISC_FEATURE (40)..(40): Substituted amino acid covalently linked to hydrophilic group
  MISC_FEATURE (40)..(40): C-terminal amidation
YXQGTFTSDYSIYLDXQAAQEFVNWLLAGGPSSGAPPPSX

SEQ ID NO: 1226 - protein, 30 aa, Artificial Sequene; identical to SEQ ID NO: 1179
  Synthetic polypeptide
  MOD_RES (2)..(2): Xaa is Aib
  MISC_FEATURE (24)..(24): Substituted amino acid covalently linked to hydrophilic group

SEQ ID NO: 1227 - protein, 29 aa, Artificial Sequence
  Synthetic polypeptide
  MOD_RES (2)..(2): Xaa is Aib
  MOD_RES (20)..(20): Xaa is Aib
  MISC_FEATURE (29)..(29): C-terminal amidation
YXQGTFTSDYSIYLDKQAAXEFVNWLLAG

SEQ ID NO: 1228 - protein, 29 aa, Artificial Sequence
  Synthetic polypeptide
  MOD_RES (2)..(2): Xaa is D-Ser, D-Ala, Val, Gly, N-Methyl Ser, N-Methyl Ala, or Aib
  MOD_RES (16)..(16): Xaa is Lys, Glu, Ser, Orn, Dab, Aib or any alpha, alpha-disubstituted amino acid
  MOD_RES (20)..(20): Xaa is any alpha, alpha-disubstituted amino acid
  MOD_RES (27)..(27): Xaa is Ile, Leu, or Nle
  MOD_RES (28)..(28): Xaa is Ala or Gly
  MOD_RES (29)..(29): Xaa is Thr, Ala, or Gly
  MISC_FEATURE (29)..(29): C-terminal amidation
YXQGTFTSDYSIYLDXQAAXEFVNWLXXX

SEQ ID NO: 1229 - protein, 29 aa, Artificial Sequence
  Synthetic polypeptide
  MOD_RES (2)..(2): Xaa is Aib
  MOD_RES (20)..(20): Xaa is Aib
  MISC_FEATURE (29)..(29): C-terminal amidation
YXQGTFTSDYSKYLDKRRAXDFVQWLLAG

SEQ ID NO: 1230 - protein, 29 aa, Artificial Sequence
  Synthetic polypeptide
  MOD_RES (2)..(2): Xaa is D-Ser, DAla, Val, Gly, N-Methyl Ser, N-Methyl Ala, or Aib
  MOD_RES (16)..(16): Xaa is Lys, Glu, Ser, Orn, Dab, Aib or any alpha, alpha-disubstituted amino acid
  MOD_RES (20)..(20): Xaa is any alpha, alpha-disubstituted amino acid
  MOD_RES (27)..(27): Xaa is Ile, Leu, or Nle
  MOD_RES (28)..(28): Xaa is Ala or Gly
  MOD_RES (29)..(29): Xaa is Thr, Ala, or Gly
  MOD_RES (29)..(29): C-terminal amidation
YXQGTFTSDYSKYLDXRRAXDFVQWLXXX

SEQ ID NO: 1231 - protein, 41 aa, Artificial Sequence; identical to SEQ ID NO: 1160
  Synthetic polypeptide
  MISC_FEATURE: Homodimer
  MOD_RES (2)..(2): Xaa is Aib
  MOD_RES (20)..(20): Xaa is Aib
  MISC_FEATURE (40)..(40): 14 Carbon fatty acyl group covalently bound to Lysine
  MOD_RES (40)..(40): C-terminal amidation
  DISULFID (41)..(41): Disulfide bond formed with Cys residue of a second peptide having the same structure.

SEQ ID NO: 1232 - protein, 40 aa, Artificial Sequence
  Synthetic polypeptide
  MOD_RES (2)..(2): Xaa is Aib
  MOD_RES (20)..(20): Xaa is Aib
  MISC_FEATURE (40)..(40): C-terminal amidation
YXQGTFTSDYSIYLDKQAAXEFVNWLMNGGPSSGAPPPSK

SEQ ID NO: 1233 - protein, 40 aa, Artificial Sequence
  Synthetic polypeptide
  MOD_RES (2)..(2): Xaa is Aib
  MOD_RES (20)..(20): Xaa is Aib
  MISC_FEATURE (40)..(40): C-terminal amidation
YXQGTFISDYSIYLDKQAAXEFVNWLLAGGPSSGAPPPSK

SEQ ID NO: 1234 - protein, 40 aa, Artificial Sequence; identical to SEQ ID NO: 1233
  Synthetic polypeptide
  MOD_RES (2)..(2): Xaa is Aib
  MOD_RES (20)..(20): Xaa is Aib
  MISC_FEATURE (40)..(40): 16 Carbon fatty acyl group covalently bound to Lysine
  MISC_FEATURE (40)..(40): C-terminal amidation

SEQ ID NO: 1235 - protein, 40 aa, Artificial Sequence; identical to SEQ ID NO: 1104
  Synthetic polypeptide
  MOD_RES (2)..(2): Xaa is Aib
  MOD_RES (20)..(20): Xaa is Aib
  MISC_FEATURE (40)..(40): 16 Carbon fatty acyl group covalently bound to Lysine via a dipeptide spacer
  MISC_FEATURE (40)..(40): C-terminal amidation

SEQ ID NO: 1236 - protein, 40 aa, Artificial Sequence; identical to SEQ ID NO: 1123
  Synthetic polypeptide
  MOD_RES (2)..(2): Xaa is Aib
  MOD_RES (20)..(20): Xaa is Aib
  MISC_FEATURE (40)..(40): 16 Carbon fatty acyl group covalently bound to Lysine via a dipeptide spacer
  MISC_FEATURE (40)..(40): C-terminal amidation

SEQ ID NO: 1237 - protein, 40 aa, Artificial Sequence
  Synthetic polypeptide
  MOD_RES (2)..(2): Xaa is Aib
  MISC_FEATURE (10)..(10): 16 Carbon fatty acyl group covalently bound to Lysine via dipeptide spacer
  MOD_RES (20)..(20): Xaa is Aib
  MISC_FEATURE (40)..(40): C-terminal amidation
YXEGTFTSDKSIYLDKQAAXEFVNWLLAGGPSSGAPPPSK

SEQ ID NO: 1238 - protein, 41 aa, Artificial Sequence; identical to SEQ ID NO: 1160
  Synthetic polypeptide
  MISC_FEATURE: Homodimer
  MOD_RES (2)..(2): Xaa is Aib
  MOD_RES (20)..(20): Xaa is Aib
  MISC_FEATURE (40)..(40): 14 Carbon fatty acyl group covelently bound to Lysine
  MISC_FEATURE (41)..(41): C-terminal amidation
  MISC_FEATURE (41)..(41): Cys residue covalently attached to 20 kDa PEG which is in turn covalently attached to a Cys residue of a second peptide having the same structure

SEQ ID NO: 1239 - protein, 41 aa, Artificial Sequence; identical to SEQ ID NO: 1160
  Synthetic polypeptide
  MISC_FEATURE: homodimer
  MOD_RES (2)..(2): Xaa is Aib
  MOD_RES (20)..(20): Xaa is Aib
  MISC_FEATURE (40)..(40): 14 Carbon fatty acyl group covalently bound to Lysine
  MISC_FEATURE (41)..(41): PEG (5kDa) covalently bound to Cysteine
  MISC_FEATURE (41)..(41): C-terminal amidation
  MISC_FEATURE (41)..(41): Cys residue covalently attached to 5 kDa PEG which is in turn covalently attached to a Cys residue of a second peptide having the same structure

SEQ ID NO: 1240 - protein, 29 aa, Artificial Sequence
  Synthetic polypeptide
  MOD_RES (3)..(3): Xaa is a Glutamine analog
  MOD_RES (27)..(27): Xaa is Nle
HSXGTFTSDYSKYLDTRRAAEFVAWLXDE

SEQ ID NO: 1241 - protein, 29 aa, Artificial Sequence
  Synthetic polypeptide
  MOD_RES (3)..(3): Xaa is a Glutamine analog
  MOD_RES (16)..(16): Xaa is Aib
HSXGTFTSDYSKYLDXRRAADFVAWLMDE

SEQ ID NO: 1242 - protein, 29 aa, Artificial Sequence
  Synthetic polypeptide
  MOD_RES (27)..(27): Xaa is Nle
HSQGTFTSDYSKYLDTRRAAEFVAWLXDE

SEQ ID NO: 1243 - protein, 29 aa, Artificial Sequence
  Synthetic peptide
  MOD_RES (3)..(3): Xaa is Acetamidomethyl-cysteine
  MOD_RES (27)..(27): Xaa is Nle
HSXGTFTSDYSKYLDTRRAAEFVAWLXDE

SEQ ID NO: 1244 - protein, 29 aa, Artificial Sequence
  Synthetic peptide
  MOD_RES (3)..(3): Xaa is Acetyldiaminobutanoic acid
  MOD_RES (27)..(27): Xaa is Nle
HSXGTFTSDYSKYLDTRRAAEFVAWLXDE

SEQ ID NO: 1245 - protein, 29 aa, Artificial Sequence
  Synthetic polypeptide
  MOD_RES (3)..(3): Xaa is carbamoyldiaminopropanoic acid
  MOD_RES (27)..(27): Xaa is Nle
HSXGTFTSDYSKYLDTRRAAEFVAWLXDE

SEQ ID NO: 1246 - protein, 29 aa, Artificial Sequence
  Synthetic polypeptide
  MOD_RES (3)..(3): Xaa is Methylglutamine
  MOD_RES (27)..(27): Xaa is Nle
HSXGTFTSDYSKYLDTRRAAEFVAWLXDE

SEQ ID NO: 1247 - protein, 29 aa, Artificial Sequence
  Synthetic peptide
  MOD_RES (3)..(3): Xaa is Methionine sulfoxide
  MOD_RES (27)..(27): Xaa is Nle
HSXGTFTSDYSKYLDTRRAAEFVAWLXDE

SEQ ID NO: 1248 - protein, 29 aa, Artificial Sequence
  Synthetic peptide
  MOD_RES (3)..(3): Xaa is Acetylornithine
  MOD_RES (27)..(27): Xaa is Nle
HSXGTFTSDYSKYLDTRRAAEFVAWLXDE

SEQ ID NO: 1249 - protein, 29 aa, Artificial Sequence
  Synthetic polypeptide
  MOD_RES (16)..(16): Xaa is Aib
HSQGTFTSDYSKYLDXRRAADFVAWLMDE

SEQ ID NO: 1250 - protein, 29 aa, Artificial Sequence
  Synthetic polypeptide
  MOD_RES (3)..(3): Xaa is Acetyldiaminobutanoic acid
  MOD_RES (16)..(16): Xaa is Aib
HSXGTFTSDYSKYLDXRRAADFVAWLMDE

SEQ ID NO: 1251 - protein, 29 aa, Artificial Sequence
  Synthetic polypeptide
  MOD_RES (3)..(3): Xaa is Methylglutamine
  MOD_RES (16)..(16): Xaa is Aib
HSXGTFTSDYSKYLDXRRAADFVAWLMDE

SEQ ID NO: 1252 - protein, 29 aa, Artificial Sequence
  Synthetic polypeptide
HSQGTFTSDYSKYLDSRRAQDFVQWLMDT

SEQ ID NO: 1253 - protein, 29 aa, Artificial Sequence
  Synthetic polypeptide
  MOD_RES (3)..(3): Xaa is Acetyldiaminobutanoic acid
  MOD_RES (16)..(16): Xaa is Aib
HSXGTFTSDYSKYLDXRRAADFVAWLLDE

SEQ ID NO: 1254 - protein, 39 aa, Artificial Sequence; identical to SEQ ID NO: 604
  Synthetic polypeptide
  MOD_RES (3)..(3): Xaa is Acetyldiaminobutanoic acid
  MOD_RES (16)..(16): Xaa is Aib
  MISC_FEATURE (39)..(39): C-terminal amidation

SEQ ID NO: 1255 - protein, 29 aa, Artificial Sequence
  Synthetic polypeptide
  MOD_RES (3)..(3): Xaa is Acetyldiaminobutanoic acid
  MOD_RES (16)..(16): Xaa is Aib
HSXGTFTSDYSKYLDXRRASDFVSWLLDE

SEQ ID NO: 1256 - protein, 29 aa, Artificial Sequence
  Synthetic polypeptide
  MOD_RES (3)..(3): Xaa is Acetyldiaminobutanoic acid
  MOD_RES (16)..(16): Xaa is Aib
HSXGTFTSDYSKYLDXRRATDFVTWLLDE

SEQ ID NO: 1257-1258 - skipped (2 entries)

SEQ ID NO: 1259 - protein, 40 aa, Artificial Sequence
  Synthetic peptide
  MOD_RES (2)..(2): Xaa is Aib
  MISC_FEATURE (16)..(20): Lactam bridge links Glu16 and Lys20
  MOD_RES (40)..(40): Epsilon amine of Lys is attached to Ala-Ac-Cys(PEG), wherein the Ac-Cys(PEG) is a Cys residue comprising an alpha amino group capped with an acetyl group (CH3CO) and comprising a 40 kDa PEG covalently attached to its side chain
YXQGTFTSDYSIYLDEQAAKEFVNWLLAGGPSSGAPPPSK

SEQ ID NO: 1260 - protein, 40 aa, Artificial Sequence; identical to SEQ ID NO: 1259
  Synthetic peptide
  MOD_RES (2)..(2): Xaa is Aib
  MISC_FEATURE (16)..(20): Lactam bridge links Glu16 and Lys20
  MOD_RES (40)..(40): Epsilon amine of Lys is attached to Arg-Ac-Cys(PEG), wherein the Ac-Cys(PEG) is a Cys residue comprising an alpha amino group capped with an acetyl group (CH3CO) and comprising a 40 kDa PEG covalently attached to its side chain

SEQ ID NO: 1261 - protein, 40 aa, Artificial Sequence; identical to SEQ ID NO: 1071
  Synthetic peptide
  MOD_RES (2)..(2): Xaa is Aib
  MISC_FEATURE (16)..(20): Lactam bridge links Glu16 and Lys20
  MOD_RES (40)..(40): Cys-PEG covalently linked via thioether linkage

SEQ ID NO: 1262 - protein, 40 aa, Artificial Sequence
  Synthetic peptide
  MOD_RES (2)..(2): Xaa is Aib
HXQGTFTSDYSKYLDERRAQDFVQWLMNTGPSSGAPPPSK

SEQ ID NO: 1263-1300 - skipped (38 entries)

SEQ ID NO: 1301 - protein, 29 aa, Homo sapiens
HSQGTFTSDYSKYLDSRRAQDFVQWLMNT

SEQ ID NO: 1302 - protein, 28 aa, Artificial Sequence
  Synthetic Polypeptide
  MISC_FEATURE: Glucagon analogue
  MISC_FEATURE (8)..(8): Xaa is aspartic acid, glutamic acid, cysteic acid or homocysteic acid
SQGTFTSXYSKYLDSRRAQDFVQWLMNT

SEQ ID NO: 1303 - protein, 27 aa, Artificial Sequence
  Synthetic Polypeptide
  MISC_FEATURE: Glucagon analogue
  MISC_FEATURE (7)..(7): Xaa is aspartic acid, glutamic acid, cysteic acid or homocysteic acid
QGTFTSXYSKYLDSRRAQDFVQWLMNT

SEQ ID NO: 1304 - protein, 26 aa, Artificial Sequence
  Synthetic Polypeptide
  MISC_FEATURE: Glucagon analogue
  MISC_FEATURE (6)..(6): Xaa is aspartic acid, glutamic acid, cysteic acid or homocysteic acid
GTFTSXYSKYLDSRRAQDFVQWLMNT

SEQ ID NO: 1305 - protein, 25 aa, Artificial Sequence
  Synthetic Polypeptide
  MISC_FEATURE: Glucagon analogue
  MISC_FEATURE (5)..(5): Xaa is aspartic acid, glutamic acid, cysteic acid or homocysteic acid
TFTSXYSKYLDSRRAQDFVQWLMNT

SEQ ID NO: 1306 - protein, 24 aa, Artificial Sequence
  Synthetic Polypeptide
  MISC_FEATURE: Glucagon analogue
  MISC_FEATURE (4)..(4): Xaa is glutamic acid, cysteic acid or homocysteic acid
  MISC_FEATURE (22)..(22): Xaa at position 22 is Met, Leu or Nle
FTSXYSKYLDSRRAQDFVQWLXNT

SEQ ID NO: 1307 - protein, 24 aa, Artificial Sequence
  Synthetic Polypeptide
  MOD_RES (1)..(1): N-terminal amino group replaced with hydroxy group
  MISC_FEATURE (4)..(4): Xaa is aspartic acid, glutamic acid, cysteic acid or homocysteic acid
  MISC_FEATURE (22)..(22): Xaa is Met, Leu or Nle
FTSXYSKYLDSRRAQDFVQWLXNT

SEQ ID NO: 1308 - protein, 24 aa, Artificial Sequence
  Synthetic Polypeptide
  MOD_RES (1)..(1): N-terminal amino group replaced with hydroxy group
  MISC_FEATURE (22)..(22): Xaa is  Met, Leu or Nle
  MOD_RES (24)..(24): C-terminal alpha carboxylate replaced with amide
FTSDYSRYLDSRRAQDFVQWLXNT

SEQ ID NO: 1309 - protein, 24 aa, Artificial Sequence
  Synthetic Polypeptide
  MISC_FEATURE: Glucagon analogue
  MOD_RES (1)..(1): N-terminal amino group replaced with hydroxy group
  MISC_FEATURE (4)..(4): Xaa is aspartic acid, glutamic acid, cysteic acid or homocysteic acid
  MISC_FEATURE (7)..(7): Xaa is Lys or Arg
  MISC_FEATURE (11)..(11): Xaa is Lys, Cys, Orn, homocysteine or acetyl phenyalanine
  MISC_FEATURE (22)..(22): Xaa is Met, Leu or Nle
FTSXYSXYLDXRRAQDFVQWLXNT

SEQ ID NO: 1310 - protein, 24 aa, Artificial Sequence
  Synthetic Polypeptide
  MISC_FEATURE: Glucagon analogue
  MOD_RES (1)..(1): N-terminal amino group replaced with hydroxy group
  MISC_FEATURE (4)..(4): Xaa is aspartic acid, glutamic acid, cysteic acid or homocysteic acid
  MISC_FEATURE (7)..(7): Xaa is is Lys or Arg
  MISC_FEATURE (16)..(16): Xaa is Lys, Cys, Orn, homocysteine or acetyl phenylalanine
  MISC_FEATURE (22)..(22): Xaa is Met, Leu or Nle
FTSXYSXYLDSRRAQXFVQWLXNT

SEQ ID NO: 1311 - protein, 24 aa, Artificial Sequence
  Synthetic Polypetide
  MISC_FEATURE: Glucagon analogue
  MOD_RES (1)..(1): N-terminal amino group replaced with hydroxy group
  MISC_FEATURE (4)..(4): Xaa is aspartic acid, glutamic acid, cysteic acid or homocysteic acid
  MISC_FEATURE (7)..(7): Xaa is Lys or Arg
  MISC_FEATURE (19)..(19): Xaa is Lys, Cys, Orn, homocysteine or acetyl phenylalanine
  MISC_FEATURE (22)..(22): Xaa is Met, Leu or Nle
FTSXYSXYLDSRRAQDFVXWLXNT

SEQ ID NO: 1312 - protein, 24 aa, Artificial Sequence
  Synthetic Polypeptide
  MISC_FEATURE: Glucagon analogue
  MOD_RES (1)..(1): N-terminal amino group replaced with hydroxy group
  MISC_FEATURE (4)..(4): Xaa is aspartic acid, glutamic acid, cysteic acid or homocysteic acid
  MISC_FEATURE (7)..(7): Xaa is Lys or Arg
  MISC_FEATURE (11)..(11): Xaa is Lys, Cys, Orn, homocysteine or acetyl phenylalanine
  MISC_FEATURE (19)..(19): Xaa is Lys, Cys, Orn, homocysteine or acetyl phenylalanine
  MISC_FEATURE (22)..(22): Xaa is Met, Leu or Nle
FTSXYSXYLDXRRAQDFVXWLXNT

SEQ ID NO: 1313 - protein, 24 aa, Artificial Sequence
  Synthetic Polypeptide
  MISC_FEATURE: Glucagon analogue
  MOD_RES (1)..(1): N-terminal amino group replaced with hydroxy group
  MISC_FEATURE (4)..(4): Xaa is aspartic acid, glutamic acid, cysteic acid or homocysteic acid
  MOD_RES (11)..(11): Pegylated
  MISC_FEATURE (22)..(22): Xaa is Met, Leu or Nle
FTSXYSKYLDCRRAQDFVQWLXNT

SEQ ID NO: 1314 - protein, 24 aa, Artificial Sequence
  Synthetic Polypeptide
  MISC_FEATURE: Glucagon analogue
  MOD_RES (1)..(1): N-terminal amino group replaced with hydroxy group
  MISC_FEATURE (4)..(4): Xaa is aspartic acid, glutamic acid, cysteic acid or homocysteic acid
  MOD_RES (19)..(19): Pegylated
  MISC_FEATURE (22)..(22): Xaa is Met, Leu or Nle
FTSXYSKYLDSRRAQDFVCWLXNT

SEQ ID NO: 1315 - protein, 24 aa, Artificial Sequence
  Synthetic Polypeptide
  MISC_FEATURE: Glucagon analogue
  MOD_RES (1)..(1): N-terminal amino group replaced with hydroxy group
  MISC_FEATURE (4)..(4): Xaa is aspartic acid, glutamic acid, cysteic acid or homocysteic acid
  MISC_FEATURE (22)..(22): Xaa is Met, Leu or Nle
  MOD_RES (24)..(24): Pegylated
FTSXYSKYLDSRRAQDFVQWLXNC

SEQ ID NO: 1316 - protein, 24 aa, Artificial Sequence
  Synthetic Polypeptide
  MISC_FEATURE: Glucagon analogue
  MOD_RES (1)..(1): N-terminal amino group replaced with hydroxy group
  MISC_FEATURE (4)..(4): Xaa is aspartic acid, glutamic acid, cysteic acid or homocysteic acid
  MOD_RES (19)..(19): Pegylated
  MISC_FEATURE (22)..(22): Xaa is Met, Leu or Nle
FTSXYSRYLDSRRAQDFVKWLXNT

SEQ ID NO: 1317 - protein, 24 aa, Artificial Sequence
  Synthetic Polypeptide
  MISC_FEATURE: Glucagon analogue
  MOD_RES (1)..(1): N-terminal amino group replaced with hydroxy group
  MISC_FEATURE (4)..(4): Xaa is aspartic acid, glutamic acid, cysteic acid or homocysteic acid
  MOD_RES (11)..(11): Pegylated
  MISC_FEATURE (22)..(22): Xaa is Met, Leu or Nle
FTSXYSKYLDCRRAQDFVCWLXNT

SEQ ID NO: 1318 - protein, 24 aa, Artificial Sequence
  Synthetic Polypeptide
  MISC_FEATURE: Glucagon analogue
  MOD_RES (1)..(1): N-terminal amino group replaced with hydroxy group
  MISC_FEATURE (4)..(4): Xaa is aspartic acid, glutamic acid, cysteic acid or homocysteic acid
  MISC_FEATURE (22)..(22): Xaa is Met, Leu or Nle
  MOD_RES (24)..(24): C-terminal alpha carboxylate replaced with amide
FTSXYSKYLECRRAQDFVQWLXNT

SEQ ID NO: 1319 - protein, 10 aa, Artificial Sequence
  Synthetic Polypeptide
  MISC_FEATURE: Peptide fragment representing the carboxy terminal 10 amino acids of Exendin-4
GPSSGAPPPS

SEQ ID NO: 1320 - protein, 8 aa, Artificial Sequence
  Synthetic Polypeptide
  MISC_FEATURE: Peptide fragment representing the carboxy terminal 8 amino acids of oxyntomodulin
KRNRNNIA

SEQ ID NO: 1321 - protein, 4 aa, Artificial Sequence
  Synthetic Polypeptide
  MISC_FEATURE: Peptide fragment representing the carboxy 4 amino acids of oxyntomodulin carboxy terminus
KRNR

SEQ ID NO: 1322 - protein, 24 aa, Artificial Sequence
  Synthetic Polypeptide
  MISC_FEATURE: Glucagon analogue
  MISC_FEATURE (7)..(7): Xaa is Lys or Arg
  MISC_FEATURE (11)..(11): Xaa is Lys, Cys, Orn, homocycstein or acetyl phenyalanine
  MISC_FEATURE (19)..(19): Xaa is Lys, Cys, Orn, homocycstein or acetyl phenyalanine
FTSRYSXYLDXRRAQDFVXWLMNT

SEQ ID NO: 1323 - protein, 34 aa, Artificial Sequence
  Synthetic Polypeptide
  MISC_FEATURE: Glucagon analogue
  MISC_FEATURE (4)..(4): Xaa is aspartic acid, glutamic acid, cysteic acid or homocysteic acid
  MISC_FEATURE (7)..(7): Xaa is Lys or Arg
  MISC_FEATURE (16)..(16): Xaa is Lys, Cys, Orn, homocysteine or acetyl phenylalanine
  MISC_FEATURE (22)..(22): Xaa is Met, Leu or Nle
FTSXYSXYLDSRRAQXFVQWLXNTGPSSGAPPPS

SEQ ID NO: 1324 - protein, 32 aa, Artificial Sequence
  Synthetic Polypeptide
  MISC_FEATURE: Glucagon analogue
  MISC_FEATURE (4)..(4): Xaa is aspartic acid, glutamic acid, cysteic acid or homocysteic acid
  MISC_FEATURE (7)..(7): Xaa is Lys or Arg
  MISC_FEATURE (19)..(19): Xaa is Lys, Cys, Orn, homocysteine or acetyl phenylalanine
  MOD_RES (19)..(19): Pegylated
  MISC_FEATURE (22)..(22): Xaa is Met, Leu or Nle
FTSXYSXYLDSRRAQDFVXWLXNTKRNRNNIA

SEQ ID NO: 1325 - protein, 34 aa, Artificial Sequence
  Synthetic Polypeptide
  MISC_FEATURE: Glucagon analogue
  MISC_FEATURE (4)..(4): Xaa is aspartic acid, glutamic acid, cysteic acid or homocysteic acid
  MISC_FEATURE (7)..(7): Xaa is Lys or Arg
  MISC_FEATURE (19)..(19): Xaa is Lys, Cys, Orn, homocysteine or acetyl phenylalanine
  MOD_RES (19)..(19): Pegylated
  MISC_FEATURE (22)..(22): Xaa is Met, Leu or Nle
FTSXYSXYLDSRRAQDFVXWLXNTGPSSGAPPPS

SEQ ID NO: 1326 - protein, 32 aa, Artificial Sequence
  Synthetic Polypeptide
  MISC_FEATURE: Glucagon analogue
  MISC_FEATURE (4)..(4): Xaa is aspartic acid, glutamic acid, cysteic acid or homocysteic acid
  MISC_FEATURE (7)..(7): Xaa is Lys or Arg
  MISC_FEATURE (16)..(16): Xaa is Lys, Cys, Orn, homocysteine or acetyl phenylalanine
  MOD_RES (16)..(16): Pegylation
  MISC_FEATURE (22)..(22): Xaa is Met, Leu or Nle
FTSXYSXYLDSRRAQXFVQWLXNTKRNRNNIA

SEQ ID NO: 1327 - protein, 28 aa, Artificial Sequence
  Synthetic Polypeptide
  MISC_FEATURE: Glucagon analogue
  MISC_FEATURE (4)..(4): Xaa is aspartic acid, glutamic acid, cysteic acid or homocysteic acid
  MISC_FEATURE (7)..(7): Xaa is Lys or Arg
  MISC_FEATURE (16)..(16): Xaa is Lys, Cys, Orn, homocysteine or acetyl phenylalanine
  MOD_RES (16)..(16): Pegylated
  MISC_FEATURE (22)..(22): Xaa is Met, Leu or Nle
FTSXYSXYLDSRRAQXFVQWLXNTKRNR

SEQ ID NO: 1328 - protein, 28 aa, Artificial Sequence
  Synthetic Polypeptide
  MISC_FEATURE: Glucagon analogue
  MISC_FEATURE (4)..(4): Xaa is aspartic acid, glutamic acid, cysteic acid or homocysteic acid
  MISC_FEATURE (7)..(7): Xaa is Lys or Arg
  MISC_FEATURE (19)..(19): Xaa is Lys, Cys, Orn, homocysteine or acetyl phenylalanine
  MOD_RES (19)..(19): Pegylated
  MISC_FEATURE (22)..(22): Xaa is Met, Leu or Nle
FTSXYSXYLDSRRAQDFVXWLXNTKRNR

SEQ ID NO: 1329 - protein, 34 aa, Artificial Sequence
  Synthetic Polypeptide
  MISC_FEATURE: Glucagon analogue
  MOD_RES (1)..(1): N-terminal amino group replaced with hydroxy group
  MISC_FEATURE (4)..(4): Xaa is aspartic acid, glutamic acid, cysteic acid or homocysteic acid
  MISC_FEATURE (22)..(22): Xaa is Met, Leu or Nle
FTSXYSKYLDSRRAQDFVQWLXNTGPSSGAPPPS

SEQ ID NO: 1330 - protein, 32 aa, Artificial Sequence
  Synthetic Polypeptide
  MISC_FEATURE: Glucagon analogue
  MOD_RES (1)..(1): N-terminal amino group replaced with hydroxy group
  MISC_FEATURE (4)..(4): Xaa is aspartic acid, glutamic acid, cysteic acid or homocysteic acid
  MISC_FEATURE (22)..(22): Xaa is Met, Leu or Nle
FTSXYSKYLDSRRAQDFVQWLXNTKRNRNNIA

SEQ ID NO: 1331 - protein, 28 aa, Artificial Sequence
  Synthetic Polypeptide
  MISC_FEATURE: Glucagon analogue
  MOD_RES (1)..(1): N-terminal amino group replaced with hydroxy group
  MISC_FEATURE (4)..(4): Xaa is aspartic acid, glutamic acid, cysteic acid or homocysteic acid
  MISC_FEATURE (22)..(22): Xaa is Met, Leu or Nle
FTSXYSKYLDSRRAQCFVQWLXNTKRNR

SEQ ID NO: 1332 - protein, 29 aa, Artificial Sequence
  Synthetic Polypeptide
  MISC_FEATURE: Glucagon analogue
HSQGTFTSDYSKYLDSCRAQDFVQWLMNT

SEQ ID NO: 1333 - protein, 39 aa, Artificial Sequence; identical to SEQ ID NO: 36
  Synthetic Polypeptide
  MISC_FEATURE: Glucagon analogue

SEQ ID NO: 1334 - protein, 29 aa, Artificial Sequence
  Synthetic Polypeptide
  MISC_FEATURE: Glucagon analogue
  MOD_RES (24)..(24): 2-butyrolactone bound through thiol group of Cysteine
HSQGTFTSDYSKYLDSRRAQCFVQWLMNT

SEQ ID NO: 1335 - protein, 29 aa, Artificial Sequence
  Synthetic Polypeptide
  MISC_FEATURE: Glucagon Analogue
  MOD_RES (24)..(24): Carboxymethyl group bound through thiol group of Cysteine
HSQGTFTSDYSKYLDSRRAQCFVQWLMNT

SEQ ID NO: 1336 - protein, 24 aa, Artificial Sequence
  Synthetic Polypeptide
  MISC_FEATURE: Glucagon analogue
  MOD_RES (1)..(1): N-terminal amino group replaced with hydroxy group
  MISC_FEATURE (4)..(4): Xaa is aspartic acid, glutamic acid, cysteic acid or homocysteic acid
  MISC_FEATURE (22)..(22): Xaa is Met, Leu or Nle
FTSXYSKYLESRRAQDFVQWLXNT

SEQ ID NO: 1337 - protein, 24 aa, Artificial Sequence
  Synthetic Polypeptide
  MISC_FEATURE: Glucagon analogue
  MOD_RES (1)..(1): N-terminal amino group replaced with hydroxy group
  MISC_FEATURE (22)..(22): Xaa is Met, Leu or Nle
FTSDYSKYLDSRRAQDFVQWLXNT

SEQ ID NO: 1338 - protein, 24 aa, Artificial Sequence
  Synthetic Polypeptide
  MISC_FEATURE: Glucagon analogue
  MOD_RES (1)..(1): N-terminal amino group replaced with hydroxy group
  MISC_FEATURE (22)..(22): Xaa is Met, Leu or Nle
FTSDYSKYLESRRAQDFVQWLXNT

SEQ ID NO: 1339 - protein, 24 aa, Artificial Sequence
  Synthetic Polypeptide
  MISC_FEATURE: Glucagon analogue
  MISC_FEATURE (1)..(1): N-terminal amino group replaced with hydroxy group
  MISC_FEATURE (4)..(4): Xaa is aspartic acid, glutamic acid, cysteic acid or homocysteic acid
  MISC_FEATURE (22)..(22): Xaa is Met, Leu or Nle
  MISC_FEATURE (23)..(23): Xaa is Asn, Asp, Glu, cysteic acid or homocysteic acid
  MISC_FEATURE (24)..(24): Xaa id Thr, Asp, Glu, cysteic acid or homocysteic acid
FTSXYSKYLDSRRAQDFVQWLXXX

SEQ ID NO: 1340 - protein, 24 aa, Artificial Sequence
  Synthetic Polypeptide
  MISC_FEATURE: Glucagon analogue
  MOD_RES (1)..(1): N-terminal amino group replaced with hydroxy group
  MISC_FEATURE (4)..(4): Xaa is aspartic acid, glutamic acid, cysteic acid or homocysteic acid
  MISC_FEATURE (10)..(10): Xaa is Glu, cysteic acid, homoglutamic acid or homocysteic acid
  MISC_FEATURE (22)..(22): Xaa is Met, Leu or Nle
  MISC_FEATURE (23)..(23): Xaa is Asn or an acidic amino acid
  MISC_FEATURE (24)..(24): Xaa is Thr or an acidic amino acid
FTSXYSKYLXSRRAQDFVQWLXXX

SEQ ID NO: 1341 - protein, 24 aa, Artificial Sequence
  Synthetic Polypeptide
  MISC_FEATURE: Glucagon analogue
  MOD_RES (1)..(1): N-terminal amino group replaced with hydroxy group
  MISC_FEATURE (4)..(4): Xaa is aspartic acid, glutamic acid, cysteic acid or homocysteic acid
  MISC_FEATURE (10)..(10): Xaa is Glu, cysteic acid, homoglutamic acid or homocysteic acid
  MISC_FEATURE (22)..(22): Xaa is Met, Leu or Nle
  MISC_FEATURE (23)..(23): Xaa is Asn, Asp or Glu
  MISC_FEATURE (24)..(24): Xaa is Thr, glu or Asp
FTSXYSKYLXSRRAQDFVQWLXXX

SEQ ID NO: 1342 - protein, 24 aa, Artificial Sequence
  Synthetic Polypeptide
  MISC_FEATURE: Glucagon analogue
  MOD_RES (1)..(1): N-terminal amino group replaced with hydroxy group
  MISC_FEATURE (4)..(4): Xaa is aspartic acid, glutamic acid, cysteic acid or homocysteic acid
  MISC_FEATURE (10)..(10): Xaa is Glu, cysteic acid, homoglutamic acid or homocysteic acid
  MISC_FEATURE (22)..(22): Xaa is Met, Leu or Nle
  MISC_FEATURE (23)..(23): Xaa is Asn or an acidic amino acid
  MISC_FEATURE (24)..(24): Xaa is Thr or an acidic amino acid
FTSXYSKYLXSRRAQDFVQWLXXX

SEQ ID NO: 1343 - protein, 24 aa, Artificial Sequence
  Synthetic Polypeptide
  MISC_FEATURE: Glucagon analogue
  MOD_RES (1)..(1): N-terminal amino group replaced with hydroxy group
  MISC_FEATURE (4)..(4): Xaa is aspartic acid, glutamic acid, cysteic acid or homocysteic acid
  MISC_FEATURE (10)..(10): Xaa is Asp, Glu, cysteic acid, homoglutamic acid or homocysteic acid
  MOD_RES (11)..(11): 20kDa PEG group attached to Xaa at position 11
  MISC_FEATURE (22)..(22): Xaa is Met, Leu or Nle
  MISC_FEATURE (23)..(23): Xaa is Asn or an acidic amino acid
  MISC_FEATURE (24)..(24): Xaa is Thr or an acidic amino acid
FTSXYSKYLXCRRAQDFVQWLXXX

SEQ ID NO: 1344 - protein, 24 aa, Artificial Sequence
  Synthetic Polypeptide
  MISC_FEATURE: Glucagon analogue
  MOD_RES (1)..(1): N-terminal amino group replaced with hydroxy group
  MISC_FEATURE (4)..(4): Xaa is aspartic acid, glutamic acid, cysteic acid or homocysteic acid
  MISC_FEATURE (10)..(10): Xaa is Asp, Glu, cysteic acid, homoglutamic acid or homocysteic acid
  MOD_RES (16)..(16): 20kDa PEG group attached to Xaa at position 16
  MISC_FEATURE (22)..(22): Xaa is Met, Leu or Nle
  MISC_FEATURE (23)..(23): Xaa is Asn or an acidic amino acid
  MISC_FEATURE (24)..(24): Xaa is Thr or an acidic amino acid
FTSXYSKYLXSRRAQCFVQWLXXX

SEQ ID NO: 1345 - protein, 24 aa, Artificial Sequence
  Synthetic Polypeptide
  MISC_FEATURE: Glucagon analogue
  MOD_RES (1)..(1): N-terminal amino group replaced with hydroxy group
  MISC_FEATURE (4)..(4): Xaa is aspartic acid, glutamic acid, cysteic acid or homocysteic acid
  MISC_FEATURE (10)..(10): Xaa is Asp, Glu, cysteic acid, homoglutamic acid or homocysteic acid
  MOD_RES (19)..(19): Pegylated
  MISC_FEATURE (22)..(22): Xaa is Met, Leu or Nle
  MISC_FEATURE (23)..(23): Xaa is Asn or an acidic amino acid
  MISC_FEATURE (24)..(24): Xaa is Thr or an acidic amino acid
FTSXYSKYLXSRRAQDFVCWLXXX

SEQ ID NO: 1346 - protein, 35 aa, Artificial Sequence
  Synthetic Polypeptide
  MISC_FEATURE: Glucagon analogue
  MOD_RES (1)..(1): N-terminal amino group replaced with hydroxy group
  MISC_FEATURE (4)..(4): Xaa is aspartic acid, glutamic acid, cysteic acid or homocysteic acid
  MISC_FEATURE (10)..(10): Xaa is Asp, Glu, cysteic acid, homoglutamic acid or homocysteic acid
  MISC_FEATURE (22)..(22): Xaa is Met, Leu or Nle
  MISC_FEATURE (23)..(23): Xaa is Asn or an acidic amino acid
  MISC_FEATURE (24)..(24): Xaa is Thr or an acidic amino acid
  MISC_FEATURE (25)..(25): Xaa is Lys, Cys, Orn, homocycstein or acetyl phenyalanine
  MOD_RES (25)..(25): Pegylated
FTSXYSKYLXSRRAQDFVQWLXXXXGPSSGAPPPS

SEQ ID NO: 1347 - protein, 35 aa, Artificial Sequence
  Synthetic Polypeptide
  MISC_FEATURE: Glucagon analogue
  MOD_RES (1)..(1): N-terminal amino group replaced with hydroxy group
  MISC_FEATURE (4)..(4): Xaa is aspartic acid, glutamic acid, cysteic acid or homocysteic acid
  MISC_FEATURE (10)..(10): Xaa is Asp, Glu, cysteic acid, homoglutamic acid or homocysteic acid
  MISC_FEATURE (22)..(22): Xaa is Met, Leu or Nle
  MISC_FEATURE (23)..(23): Xaa is Asn or an acidic amino acid
  MISC_FEATURE (24)..(24): Xaa is Thr or an acidic amino acid
  MISC_FEATURE (35)..(35): Xaa is Lys, Cys, Orn, homocysteine or acetyl phenyalanine
  MOD_RES (35)..(35): Pegylated
FTSXYSKYLXSRRAQDFVQWLXXXGPSSGAPPPSX

SEQ ID NO: 1348 - protein, 39 aa, Artificial Sequence; identical to SEQ ID NO: 39
  Synthetic Polypeptide
  MISC_FEATURE: Glucagon analogue

SEQ ID NO: 1349 - protein, 35 aa, Artificial Sequence
  Synthetic Polypeptide
  MISC_FEATURE: Glucagon analogue
  MOD_RES (1)..(1): N-terminal amino group replaced with hydroxy group
  MISC_FEATURE (4)..(4): Xaa is aspartic acid, glutamic acid, cysteic acid or homocysteic acid
  MISC_FEATURE (7)..(7): Xaa is Lys or Arg
  MISC_FEATURE (22)..(22): Xaa is Met , Leu or Nle
  MISC_FEATURE (35)..(35): Xaa is Lys, Cys, Orn, homocysteine or acetyl phenyalanine
  MOD_RES (35)..(35): Pegylated
FTSXYSXYLDSRRAQDFVQWLXNTGPSSGAPPPSX

SEQ ID NO: 1350 - protein, 24 aa, Artificial Sequence
  Synthetic Polypeptide
  MISC_FEATURE: Glucagon analogue
  MOD_RES (1)..(1): N-terminal amino group replaced with hydroxy group
FTSEYSKYLDSRRAQDFVQWLMNT

SEQ ID NO: 1351 - protein, 20 aa, Artificial Sequence
  Synthetic Polypeptide
  MISC_FEATURE: Glucagon analogue
YSKYLDSRRAQDFVQWLMNT

SEQ ID NO: 1352 - protein, 24 aa, Artificial Sequence
  Synthetic Polypeptide
  MISC_FEATURE: Glucagon analogue
  MISC_FEATURE (4)..(4): Xaa is Homocysteic acid
FTSXYSKYLDSRRAQDFVQWLMNT

SEQ ID NO: 1353 - protein, 11 aa, Artificial Sequence
  Synthetic Polypeptide
  MISC_FEATURE: Peptide fragment representing the carboxy terminal 10 amino acids of Exendin-4
  MISC_FEATURE (11)..(11): Xaa is Lys, Cys, Orn, homocysteine or acetyl phenyalanine
GPSSGAPPPSX

SEQ ID NO: 1354 - protein, 6 aa, Artificial Sequence
  Synthetic Polypeptide
  MISC_FEATURE (6)..(6): Xaa is phenyl lactic acid
HSQGTX

SEQ ID NO: 1355 - protein, 5 aa, Artificial Sequence
  Synthetic Polypeptide
  MISC_FEATURE (5)..(5): Xaa is phenyl lactic acid
SQGTX

SEQ ID NO: 1356 - protein, 4 aa, Artificial Sequence
  Synthetic Polypeptide
  MISC_FEATURE (4)..(4): Xaa is phenyl lactic acid
QGTX

SEQ ID NO: 1357 - protein, 3 aa, Artificial Sequence
  Synthetic Polypeptide
  MISC_FEATURE (3)..(3): Xaa is phenyl lactic acid
GTX

SEQ ID NO: 1358 - protein, 2 aa, Artificial Sequence
  Synthetic Polypeptide
  MISC_FEATURE (2)..(2): Xaa is phenyl lactic acid
TX

SEQ ID NO: 1359 - protein, 6 aa, Artificial Sequence
  Synthetic Polypeptide
  MISC_FEATURE (1)..(1): Xaa is selected from a group consisting of His, D-histidine, alpha, alpha-dimethyl imidiazole acetic acid (DMIA), N-methyl histidine, alpha-methyl histidine, imidazole acetic acid, desaminohistidine, hydroxyl-histidine, acetyl-histidine and
  MISC_FEATURE (2)..(2): Xaa is selected from a group consisting of Ser, D-serine, D-alanine, Val, Gly, N-methyl serine, N-methyl alanine, and aminoisobutyric acid (AIB)
  MISC_FEATURE (3)..(3): Xaa is selected from a group consisting of Glu or Gln
  MISC_FEATURE (6)..(6): Xaa is phenyl lactic acid
XXXGTX

SEQ ID NO: 1360 - protein, 5 aa, Artificial Sequence
  Synthetic Polypeptide
  MISC_FEATURE (1)..(1): Xaa is selected from a group consisting of Ser, D-serine, D-alanine, Val, Gly, N-methyl serine, N-methyl alanine, and aminoisobutyric acid (AIB)
  MISC_FEATURE (2)..(2): Xaa is selected from a group consisting of Glu or Gln
  MISC_FEATURE (5)..(5): Xaa is phenyl lactic acid
XXGTX

SEQ ID NO: 1361 - protein, 4 aa, Artificial Sequence
  Synthetic Polypeptide
  MISC_FEATURE (1)..(1): Xaa is selected from a group consisting of Glu and Gln
  MISC_FEATURE (4)..(4): Xaa is phenyl lactic acid
XGTX

SEQ ID NO: 1362 - protein, 24 aa, Artificial Sequence
  Synthetic Polypeptide
  MOD_RES (1)..(1): N-terminal amino group replaced with hydroxy group
  MOD_RES (24)..(24): C-terminal alpha carboxylate optionally replaced with amide
FTSDYSKYLDSRRAQDFVQWLMDT

SEQ ID NO: 1363 - protein, 28 aa, Artificial Sequence
  Synthetic Polypeptide
  MOD_RES (28)..(28): C-terminal alpha carboxylate optionally replaced with amide
SQGTFTSEYSKYLDSRRAQDFVQWLMNT

SEQ ID NO: 1364 - protein, 28 aa, Artificial Sequence
  Synthetic Polypeptide
  MISC_FEATURE (4)..(5): Threonine in position 4 and phenyl lactic acid in position 5 linked via ester bond
  MISC_FEATURE (5)..(5): Xaa is phenyl lactic acid
  MOD_RES (28)..(28): Optional C-terminal alpha carboxylate replaced with amide
  MOD_RES (28)..(28): C-terminal alpha carboxylate optionally replaced with amide
SQGTXTSEYSKYLDSRRAQDFVQWLMNT

SEQ ID NO: 1365 - protein, 29 aa, Artificial Sequence
  Synthetic Polypeptide
  MISC_FEATURE (5)..(6): Threonine in position 5 and phenyl lactic acid in position 6 linked via ester bond
  MISC_FEATURE (6)..(6): Xaa is phenyl lactic acid
  MOD_RES (29)..(29): C-terminal alpha carboxylate optionally replaced with amide
HSQGTXTSEYSKYLDSRRAQDFVQWLMNT

SEQ ID NO: 1366 - protein, 24 aa, Artificial Sequence
  Synthetic Polypeptide
  MOD_RES (1)..(1): N-terminal amino group replaced with hydroxy group
  MISC_FEATURE (11)..(11): Xaa is amino isobutyric acid
FTSDYSKYLDXRRAQDFVQWLMNT

SEQ ID NO: 1367 - protein, 24 aa, Artificial Sequence
  Synthetic Polypeptide
  MOD_RES (1)..(1): N-terminal amino group replaced with hydroxy group
FTSDYSKYLDERRAQDFVQWLMNT

SEQ ID NO: 1368 - protein, 6 aa, Artificial Sequence
  Synthetic Polypeptide
  MISC_FEATURE (1)..(1): Xaa is selected from a group consisting of His, D-histidine, alpha, alpha-dimethyl imidiazole acetic acid (DMIA), N-methyl histidine, alpha-methyl histidine, imidazole acetic acid, desaminohistidine, hydroxyl-histidine, acetyl-histidine and
  MISC_FEATURE (2)..(2): Xaa is selected from a group consisting of Ser, D-serine, D-alanine, Val, Gly, N-methyl serine, N-methyl alanine, and aminoisobutyric acid (AIB)
  MISC_FEATURE (3)..(3): Xaa is selected from a group consisting of Glu or Gln
XXXTGF

SEQ ID NO: 1369 - protein, 5 aa, Artificial Sequence
  Synthetic Polypeptide
  MISC_FEATURE (1)..(1): Xaa is selected from a group consisting of Ser, D-serine, D-alanine, Val, Gly, N-methyl serine, N-methyl alanine, and aminoisobutyric acid (AIB)
  MISC_FEATURE (2)..(2): Xaa is selected from a group consisting of Glu or Gln
XXTGF

SEQ ID NO: 1370 - protein, 4 aa, Artificial Sequence
  Synthetic Polypeptide
  MISC_FEATURE (1)..(1): Xaa is selected from a group consisting of Glu or Gln
XTGF

SEQ ID NO: 1371 - protein, 24 aa, Artificial Sequence
  Synthetic Polypeptide
  MOD_RES (1)..(1): N-terminal amino group replaced with hydroxy group
  MISC_FEATURE (24)..(24): C-terminal alpha carboxylate optionally replaced with an amide
FTSEYSKYLDSRRAQDFVQWLMNT

SEQ ID NO: 1372-1400 - skipped (29 entries)

SEQ ID NO: 1401 - protein, 29 aa, Homo sapiens
HSQGTFTSDYSKYLDSRRAQDFVQWLMNT

SEQ ID NO: 1402 - protein, 24 aa, Artificial Sequence
  Synthetic Polypeptide
  MISC_FEATURE: Glucagon analogue
  MOD_RES (1)..(1): N-terminal amino group replaced with hydroxy group
FTSDYSKYLDSRRAQDFVQWLMNT

SEQ ID NO: 1403 - protein, 31 aa, Homo sapiens; identical to SEQ ID NO: 50

SEQ ID NO: 1404 - protein, 30 aa, Homo sapiens; identical to SEQ ID NO: 52

SEQ ID NO: 1405 - protein, 24 aa, Artificial Sequence
  Synthetic Polypeptide
  MISC_FEATURE: Glucagon analogue
  MOD_RES (1)..(1): N-terminal amino group replaced with hydroxy group
FTSDYSKYLDERRAQDFVQWLMNT

SEQ ID NO: 1406 - protein, 24 aa, Artificial Sequence
  Synthetic Polypeptide
  MOD_RES (1)..(1): N-terminal amino group replaced with hydroxy group
FTSDYSKYLDERRAKDFVQWLMNT

SEQ ID NO: 1407 - protein, 24 aa, Artificial Sequence
  Synthetic Polypeptide
  MISC_FEATURE: Glucagon analogue
  MOD_RES (1)..(1): N-terminal amino group replaced with hydroxy group
  MISC_FEATURE (11)..(11): Xaa is Ser or Glu
FTSDYSKYLDXRRAKDFVEWLMNT

SEQ ID NO: 1408 - protein, 24 aa, Artificial Sequence
  Synthetic Polypeptide
  MISC_FEATURE: Glucagon analogue
  MOD_RES (1)..(1): N-terminal amino group replaced with hydroxy group
  MISC_FEATURE (11)..(11): Xaa is Ser or Glu
FTSDYSKYLDXRRAQDFVEWLMKT

SEQ ID NO: 1409 - protein, 24 aa, Artificial Sequence
  Synthetic Polypeptide
  MISC_FEATURE: Glucagon analogue
  MOD_RES (1)..(1): N-terminal amino group replaced with hydroxy group
  MISC_FEATURE (7)..(7): Xaa at position 7 is Lys or Glu
  MISC_FEATURE (10)..(10): Xaa is Asp, Glu, homoglutamic acid, cysteic acid or homocysteic acid
  MISC_FEATURE (11)..(11): Xaa is Ala, Ser, Glu, Lys, homoglutamic acid or homocysteic acid
  MISC_FEATURE (15)..(15): Xaa is Gln, Glu or Lys
  MISC_FEATURE (19)..(19): Xaa is Ala, Gln, Lys or Glu
  MISC_FEATURE (23)..(23): Xaa is Asn, Lys or an acidic amino acid
  MISC_FEATURE (24)..(24): Xaa is Thr or an acidic amino acid
FTSDYSXYLXXRRAXDFVXWLMXX

SEQ ID NO: 1410 - protein, 24 aa, Artificial Sequence
  Synthetic Polypeptide
  MISC_FEATURE: Glucagon analogue
  MOD_RES (1)..(1): N-terminal amino group replaced with hydroxy group
  MISC_FEATURE (11)..(11): Xaa is Ala, Ser, Glu, Gln, homoglutamic acid or homocysteic acid
  MISC_FEATURE (15)..(15): Xaa is Gln or Lys
  MISC_FEATURE (19)..(19): Xaa is Ala, Gln or Glu
  MISC_FEATURE (23)..(23): Xaa is Asn, Lys or an acidic amino acid
FTSDYSKYLDXRRAXDFVXWLMXT

SEQ ID NO: 1411 - protein, 24 aa, Artificial Sequence
  Synthetic Polypeptide
  MISC_FEATURE: Glucagon analogue
  MOD_RES (1)..(1): N-terminal amino group replaced with hydroxy group
  MISC_FEATURE (11)..(11): Xaa is Ala, Ser, Glu, Gln, homoglutamic acid or homocysteic acid
  MISC_FEATURE (15)..(15): Xaa is Gln or Lys
FTSDYSKYLDXRRAXDFVQWLMNT

SEQ ID NO: 1412 - protein, 24 aa, Artificial Sequence
  Synthetic Polypeptide
  MISC_FEATURE: Glucagon analogue
  MOD_RES (1)..(1): N-terminal amino group replaced with hydroxy group
  MISC_FEATURE (4)..(4): Xaa is aspartic acid, glutamic acid, cysteic acid or homocysteic acid
  MISC_FEATURE (7)..(7): Xaa is Lys or Arg
  MISC_FEATURE (15)..(15): Xaa is Lys or Gln
  MISC_FEATURE (16)..(16): Xaa is Lys, Cys, Orn, homocysteine or acetyl phenyalanine
  MOD_RES (16)..(16): Pegylated
  MISC_FEATURE (19)..(19): Xaa is Lys, Cys, Orn, homocysteine or acetyl phenylalanine
  MOD_RES (19)..(19): Pegylated
  MISC_FEATURE (22)..(22): Xaa is Met, Leu or Nle
FTSXYSXYLDERRAXXFVXWLXNT

SEQ ID NO: 1413 - protein, 24 aa, Artificial Sequence
  Synthetic Polypeptide
  MISC_FEATURE: Glucagon analogue
  MOD_RES (1)..(1): N-terminal amino group replaced with hydroxy group
  MISC_FEATURE (4)..(4): Xaa is aspartic acid, glutamic acid, cysteic acid or homocysteic acid
  MISC_FEATURE (15)..(15): Xaa is Lys or Gln
  MISC_FEATURE (16)..(16): Xaa is Cys, Orn, homocysteine or acetyl phenyalanine
  MOD_RES (16)..(16): Pegylated
  MISC_FEATURE (22)..(22): Xaa is Met, Leu or Nle
FTSXYSKYLDERRAXXFVQWLXNT

SEQ ID NO: 1414 - protein, 24 aa, Artificial Sequence
  Synthetic Polypeptide
  MISC_FEATURE: Glucagon analogue
  MOD_RES (1)..(1): N-terminal amino group replaced with hydroxy group
  MISC_FEATURE (4)..(4): Xaa is aspartic acid, glutamic acid, cysteic acid or homocysteic acid
  MISC_FEATURE (15)..(15): Xaa is Lys or Gln
  MISC_FEATURE (19)..(19): Xaa is Cys, Orn, homocysteine or acetyl phenylalanine
  MOD_RES (19)..(19): Pegylated
  MISC_FEATURE (22)..(22): Xaa is Met, Leu or Nle
FTSXYSKYLDERRAXDFVXWLXNT

SEQ ID NO: 1415 - protein, 24 aa, Artificial Sequence
  Synthetic Polypeptide
  MISC_FEATURE: Glucagon analogue
  MOD_RES (1)..(1): N-terminal amino group replaced with hydroxy group
  MISC_FEATURE (4)..(4): Xaa is aspartic acid, glutamic acid, cysteic acid, homoglutamic acid or homocysteic acid
  MISC_FEATURE (7)..(7): Xaa is Lys or Glu
  MISC_FEATURE (10)..(10): Xaa is Asp, Glu, cysteic acid, homoglutamic acid or homocysteic acid
  MISC_FEATURE (11)..(11): Xaa is Ala, Ser, Glu, Lys Gln, homoglutamic acid or homocysteic acid
  MISC_FEATURE (15)..(15): Xaa is Arg, Gln, Glu or Lys
  MISC_FEATURE (19)..(19): Xaa is Ala, Gln, Lys or Glu
  MISC_FEATURE (22)..(22): Xaa is Met, Leu or Nle
  MISC_FEATURE (23)..(23): Xaa is Asn, Lys or an acidic amino acid
  MISC_FEATURE (24)..(24): Xaa is Thr or an acidic amino acid
FTSXYSXYLXXRRAXDFVXWLXXX

SEQ ID NO: 1416 - protein, 24 aa, Artificial Sequence
  Synthetic Polypeptide
  MISC_FEATURE: Glucagon analogue
  MOD_RES (1)..(1): N-terminal amino group replaced with hydroxy group
  MISC_FEATURE (7)..(11): Lactam bridge connecting residues 7 and 11
  MISC_FEATURE (10)..(10): Xaa is Glu or Asp
  MISC_FEATURE (22)..(22): Xaa is Met, Leu or Nle
  MISC_FEATURE (23)..(23): Xaa is Asn, Asp or Glu
  MOD_RES (24)..(24): C-terminal alpha carboxylate replaced with amide
FTSDYSKYLXERRAQDFVQWLXXT

SEQ ID NO: 1417 - protein, 24 aa, Artificial Sequence
  Synthetic Polypeptide
  MISC_FEATURE: Glucagon analogue
  MOD_RES (1)..(1): N-terminal amino group replaced with hydroxy group
  MISC_FEATURE (10)..(10): Xaa is Asp or Glu
  MISC_FEATURE (11)..(15): Lactam bridge connecting residues 11 and 15
  MISC_FEATURE (22)..(22): Xaa is Met, Leu or Nle
  MISC_FEATURE (23)..(23): Xaa is Asn, Asp or Glu
  MOD_RES (24)..(24): C-terminal alpha carboxylate replaced with amide
FTSDYSKYLXERRAKDFVQWLXXT

SEQ ID NO: 1418 - protein, 24 aa, Artificial Sequence
  Synthetic Polypeptide
  MISC_FEATURE: Glucagon analogue
  MOD_RES (1)..(1): N-terminal amino group replaced with hydroxy group
  MISC_FEATURE (10)..(10): Xaa is Asp or Glu
  MISC_FEATURE (11)..(11): Xaa is Ser or Glu
  MISC_FEATURE (15)..(19): Lactam bridge connecting residues 15 and 19
  MISC_FEATURE (22)..(22): Xaa is Met, Leu or Nle
  MISC_FEATURE (23)..(23): Xaa is Asn, Asp or Glu
  MOD_RES (24)..(24): C-terminal alpha carboxylate replaced with amide
FTSDYSKYLXXRRAKDFVEWLXXT

SEQ ID NO: 1419 - protein, 24 aa, Artificial Sequence
  Synthetic Polypeptide
  MISC_FEATURE: Glucagon analogue
  MOD_RES (1)..(1): N-terminal amino group replaced with hydroxy group
  MISC_FEATURE (10)..(10): Xaa is Asp or Glu
  MISC_FEATURE (11)..(11): Xaa is Ser or Glu
  MISC_FEATURE (19)..(23): Lactam bridge connecting residues 19 and 23
  MISC_FEATURE (22)..(22): Xaa is Met, Leu or Nle
  MISC_FEATURE (24)..(24): Xaa is Thr or Glu
  MOD_RES (24)..(24): C-terminal alpha carboxylate replaced with amide
FTSDYSKYLXXRRAQDFVEWLXKX

SEQ ID NO: 1420 - protein, 24 aa, Artificial Sequence
  Synthetic Polypeptide
  MISC_FEATURE: Glucagon analogue
  MOD_RES (1)..(1): N-terminal amino group replaced with hydroxy group
  MISC_FEATURE (4)..(4): Xaa is aspartic acid, glutamic acid, cysteic acid or homocysteic acid
  MISC_FEATURE (7)..(7): Xaa is Lys or Glu
  MISC_FEATURE (10)..(10): Xaa is Asp, Glu, cysteic acid, homoglutamic acid or homocysteic acid
  MISC_FEATURE (11)..(11): Xaa is Ala, Ser, Glu, Lys Gln, homoglutamic acid or homocysteine
  MISC_FEATURE (15)..(15): Xaa is Arg, Gln, Glu or Lys
  MISC_FEATURE (19)..(19): Xaa is Ala, Gln, Lys or Glu
  MISC_FEATURE (22)..(22): Xaa is Met, Leu or Nle
  MISC_FEATURE (23)..(23): Xaa is Asn, Lys, Asp, Glu, cysteic acid or homocysteic acid
  MISC_FEATURE (24)..(24): Xaa is Thr, Asp, Glu, cysteic acid and homocysteic acid
FTSXYSXYLXXRRAXDFVXWLXXX

SEQ ID NO: 1421 - protein, 10 aa, Artificial Sequence
  Synthetic Polypeptide
  MISC_FEATURE: Peptide fragment representing the carboxy terminal 10 amino acids of Exendin-4
GPSSGAPPPS

SEQ ID NO: 1422 - protein, 24 aa, Artificial Sequence
  Synthetic Polypeptide
  MISC_FEATURE: Glucagon analogue
  MOD_RES (1)..(1): N-terminal amino group replaced with hydroxy group
  MISC_FEATURE (4)..(4): Xaa is aspartic acid, glutamic acid, cysteic acid or homocysteic acid
  MISC_FEATURE (7)..(11): Lactam bridge connecting residues 7 and 11
  MISC_FEATURE (10)..(10): Xaa is Asp, Glu, cysteic acid, homoglutamic acid and homocysteic acid
  MISC_FEATURE (22)..(22): Xaa is Met, Leu or Nle
FTSXYSKYLXERRAQDFVQWLXNT

SEQ ID NO: 1423 - protein, 24 aa, Artificial Sequence
  Synthetic Polypeptide
  MISC_FEATURE: Glucagon analogue
  MOD_RES (1)..(1): N-terminal amino group replaced with hydroxy group
  MISC_FEATURE (4)..(4): Xaa is aspartic acid, glutamic acid, cysteic acid or homocysteic acid
  MISC_FEATURE (10)..(10): Xaa is Asp, Glu, cysteic acid, homoglutamic acid and homocysteic acid
  MISC_FEATURE (11)..(15): Lactam bridge connecting residues 11 and 15
  MISC_FEATURE (22)..(22): Xaa is Met, Leu or Nle
FTSXYSKYLXERRAKDFVQWLXNT

SEQ ID NO: 1424 - protein, 24 aa, Artificial Sequence
  Synthetic Polypeptide
  MISC_FEATURE: Glucagon analogue
  MOD_RES (1)..(1): N-terminal amino group replaced with hydroxy group
  MISC_FEATURE (4)..(4): Xaa is aspartic acid, glutamic acid, cysteic acid or homocysteic acid
  MISC_FEATURE (10)..(10): Xaa is Asp, Glu, cysteic acid, homoglutamic acid and homocysteic acid
  MISC_FEATURE (15)..(19): Lactam bridge connecting residues 15 and 19
  MISC_FEATURE (22)..(22): Xaa is Met, Leu or Nle
FTSXYSKYLXERRAKDFVEWLXNT

SEQ ID NO: 1425 - protein, 24 aa, Artificial Sequence
  Synthetic Polypeptide
  MISC_FEATURE: Glucagon analogue
  MOD_RES (1)..(1): N-terminal amino group replaced with hydroxy group
  MISC_FEATURE (4)..(4): Xaa is aspartic acid, glutamic acid, cysteic acid or homocysteic acid
  MISC_FEATURE (10)..(10): Xaa is Asp, Glu, cysteic acid, homoglutamic acid and homocysteic acid
  MISC_FEATURE (19)..(24): Lactam bridge connecting residues 19 and 24
  MISC_FEATURE (22)..(22): Xaa is Met, Leu or Nle
FTSXYSKYLXERRAQDFVEWLXKT

SEQ ID NO: 1426 - protein, 8 aa, Artificial Sequence
  Synthetic Polypeptide
  MISC_FEATURE: Peptide fragment representing the carboxy terminal 8 amino acids of oxyntomodulin
KRNRNNIA

SEQ ID NO: 1427 - protein, 4 aa, Artificial Sequence
  Synthetic Polypeptide
  MISC_FEATURE: Peptide fragment representing the carboxy 4 amino acids of oxyntomodulin carboxy terminus
KRNR

SEQ ID NO: 1428 - protein, 34 aa, Artificial Sequence
  Synthetic Polypeptide
  MISC_FEATURE: Glucagon analogue
FTSEYSKYLDERRAQDFVQWLMNTGPSSGAPPPS

SEQ ID NO: 1429 - protein, 34 aa, Artificial Sequence; identical to SEQ ID NO: 1428
  Synthetic Polypeptide
  MISC_FEATURE (7)..(11): Lactam bridge connecting residues 7 and 11

SEQ ID NO: 1430 - protein, 34 aa, Artificial Sequence
  Synthetic Polypeptide
  MISC_FEATURE: Glucagon analogue
  MISC_FEATURE (11)..(15): Lactam bridge connecting residues 11 and 15
FTSEYSKYLDERRAKDFVQWLMNTGPSSGAPPPS

SEQ ID NO: 1431 - protein, 34 aa, Artificial Sequence
  Synthetic Polypeptide
  MISC_FEATURE: Glucagon analogue
  MISC_FEATURE (7)..(11): Lactam bridge connecting residues 7 and 11
FTSDYSKYLDERRAQDFVQWLMNTGPSSGAPPPS

SEQ ID NO: 1432 - protein, 34 aa, Artificial Sequence; identical to SEQ ID NO: 1428
  Synthetic Polypeptide
  MISC_FEATURE: Glucagon analogue
  MOD_RES (1)..(1): N-terminal amino group replaced with hydroxy group
  MISC_FEATURE (7)..(11): Lactam bridge connecting residues 7 and 11

SEQ ID NO: 1433 - protein, 34 aa, Artificial Sequence; identical to SEQ ID NO: 1430
  Synthetic Polypeptide
  MISC_FEATURE: Glucagon analogue
  MOD_RES (1)..(1): N-terminal amino group replaced with hydroxy group
  MISC_FEATURE (11)..(15): Lactam bridge connecting residues 11 and 15

SEQ ID NO: 1434 - protein, 24 aa, Artificial Sequence
  Synthetic Polypeptide
  MISC_FEATURE: Glucagon analogue
  MOD_RES (1)..(1): N-terminal amino group replaced with hydroxy group
FTSDYSKYLDSRRAQDFVQWLMDT

SEQ ID NO: 1435 - protein, 24 aa, Artificial Sequence
  Synthetic Polypeptide
  MISC_FEATURE: Glucagon analogue
  MOD_RES (1)..(1): N-terminal amino group replaced with hydroxy group
  MISC_FEATURE (7)..(11): Lactam bridge connecting residues 7 and 11
FTSEYSKYLDERRAQDFVQWLMNT

SEQ ID NO: 1436 - protein, 24 aa, Artificial Sequence
  Synthetic Polypeptide
  MISC_FEATURE: Glucagon analogue
  MOD_RES (1)..(1): N-terminal amino group replaced with hydroxy group
  MISC_FEATURE (11)..(15): Lactam bridge connecting residues 11 and 15
FTSEYSKYLDERRAKDFVQWLMNT

SEQ ID NO: 1437 - protein, 31 aa, Artificial Sequence
  Synthetic Polypeptide
  MISC_FEATURE: Glucagon analogue
HSQGTFTSDYARYLDARRAREFIKWLVRGRG

SEQ ID NO: 1438 - protein, 24 aa, Artificial Sequence
  Synthetic Polypeptide
  MISC_FEATURE: Glucagon analogue
  MOD_RES (1)..(1): N-terminal amino group replaced with hydroxy group
  MOD_RES (24)..(24): C-terminal alpha carboxylate replaced with amide
FTSDYSKYLDERRAQDFVQWLMNT

SEQ ID NO: 1439 - protein, 24 aa, Artificial Sequence
  Synthetic Polypeptide
  MISC_FEATURE: Glucagon analogue
  MOD_RES (1)..(1): N-terminal amino group replaced with hydroxy group
  MISC_FEATURE (4)..(4): Xaa is aspartic acid, glutamic acid, cysteic acid or homocysteic acid
  MISC_FEATURE (10)..(10): Xaa is Asp, Glu, cysteic acid, homoglutamic acid or homocysteic acid
  MISC_FEATURE (22)..(22): Xaa is Met, Leu or Nle
  MOD_RES (24)..(24): C-terminal alpha carboxylate replaced with amide
FTSXYSKYLXERRAKDFVQWLXNT

SEQ ID NO: 1440 - protein, 29 aa, Artificial Sequence
  Synthetic Polypeptide
  MISC_FEATURE: Glucagon analogue
HSQGTFTSDYSKYLDSCRAQDFVQWLMNT

SEQ ID NO: 1441 - protein, 39 aa, Artificial Sequence; identical to SEQ ID NO: 36
  Synthetic Polypeptide
  MISC_FEATURE: Glucagon Analogue

SEQ ID NO: 1442 - protein, 29 aa, Artificial Sequence
  Synthetic Polypeptide
  MISC_FEATURE: Glucagon analogue
  MOD_RES (24)..(24): 2-butyrolactone bound through thiol group of Cysteine
HSQGTFTSDYSKYLDSRRAQCFVQWLMNT

SEQ ID NO: 1443 - protein, 29 aa, Artificial Sequence
  Synthetic Polypeptide
  MISC_FEATURE: Glucagon Analogue
  MOD_RES (21)..(21): Carboxymethyl group bound through thiol group of Cysteine
HSQGTFTSDYSKYLDSRRAQCFVQWLMNT

SEQ ID NO: 1444 - protein, 39 aa, Homo sapiens
HSQGTFTSDYSRYLDSRRAQDFVQWLRNTGPSSGAPPPS

SEQ ID NO: 1445 - protein, 35 aa, Artificial Sequence; identical to SEQ ID NO: 1346
  Synthetic Polypeptide
  MISC_FEATURE: Glucagon analogue
  MOD_RES (1)..(1): N-terminal amino group replaced with hydroxy group
  MISC_FEATURE (4)..(4): Xaa is aspartic acid, glutamic acid, cysteic acid or homocysteic acid
  MISC_FEATURE (7)..(11): Lactam bridge connecting residues 7 and 11
  MISC_FEATURE (10)..(10): Xaa is Asp, Glu, cysteic acid, homoglutamic acid or homocysteic acid
  MISC_FEATURE (22)..(22): Xaa is Met, Leu or Nle
  MISC_FEATURE (23)..(23): Xaa is Asn, Lys, Asp, Glu, cysteic acid and homocysteic acid
  MISC_FEATURE (24)..(24): Xaa is Thr, Asp, Glu, cysteic acid and homocysteic acid
  MISC_FEATURE (25)..(25): Xaa is Cys, Orn, homocysteine or acetyl phenyalanine
  MOD_RES (25)..(25): Pegylated

SEQ ID NO: 1446 - protein, 35 aa, Artificial Sequence; identical to SEQ ID NO: 1347
  Synthetic Polypeptide
  MISC_FEATURE: Glucagon analogue
  MOD_RES (1)..(1): N-terminal amino group replaced with hydroxy group
  MISC_FEATURE (4)..(4): Xaa is aspartic acid, glutamic acid, cysteic acid or homocysteic acid
  MISC_FEATURE (10)..(10): Xaa is Asp, Glu, cysteic acid, homoglutamic acid or homocysteic acid
  MISC_FEATURE (11)..(15): Lactam bridge connecting residues 11 and 15
  MISC_FEATURE (22)..(22): Xaa is Met, Leu or Nle
  MISC_FEATURE (23)..(23): Xaa is Asn, Lys, Asp, Glu, cysteic acid and homocysteic acid
  MISC_FEATURE (24)..(24): Xaa is Thr, Asp, Glu, cysteic acid and homocysteic acid
  MISC_FEATURE (35)..(35): Xaa is Cys, Orn, homocysteine or acetyl phenyalanine
  MOD_RES (35)..(35): Pegylated

SEQ ID NO: 1447 - protein, 24 aa, Artificial Sequence
  Synthetic Polypeptide
  MISC_FEATURE: Glucagon analogue
  MISC_FEATURE (4)..(4): Xaa is glutamic acid, homoglutamic acid, cysteic acid or homocysteic acid
  MISC_FEATURE (7)..(11): Lactam bridge connecting residues 7 and 11
  MISC_FEATURE (10)..(10): Xaa is Glu or Asp
  MISC_FEATURE (22)..(22): Xaa is Met, Leu or Nle
  MISC_FEATURE (23)..(23): Xaa is Asn, Asp or Glu
FTSXYSKYLXERRAQDFVQWLXXT

SEQ ID NO: 1448 - protein, 24 aa, Artificial Sequence
  Synthetic Polypeptide
  MISC_FEATURE: Glucagon analogue
  MISC_FEATURE (4)..(4): Xaa is glutamic acid, homoglutamic acid,  cysteic acid or homocysteic acid
  MISC_FEATURE (10)..(10): Xaa is Asp or Glu
  MISC_FEATURE (11)..(15): Lactam bridge connecting residues 11 and 15
  MISC_FEATURE (22)..(22): Xaa is Met, Leu or Nle
  MISC_FEATURE (23)..(23): Xaa is Asn, Asp or Glu
FTSXYSKYLXERRAKDFVQWLXXT

SEQ ID NO: 1449 - protein, 23 aa, Artificial Sequence
  Synthetic Polypeptide
  MISC_FEATURE: Glucagon analogue
TSDYSKYLDERRAKDFVQWLMDT

SEQ ID NO: 1450 - protein, 11 aa, Artificial Sequence
  Synthetic Polypeptide
  MISC_FEATURE: Peptide fragment representing the carboxy terminal 10 amino acids of Exendin-4 plus one additional amino acid
  MISC_FEATURE (11)..(11): Xaa is selected form the group consisting of Cys, Orn, Lys, homocysteine and acetyl phenyalanine
GPSSGAPPPSX

SEQ ID NO: 1451 - protein, 24 aa, Artificial Sequence
  Synthetic Polypeptide
  MISC_FEATURE: Glucagon analogue
  MOD_RES (1)..(1): N-terminal amino group replaced with hydroxy group
  MISC_FEATURE (4)..(4): Xaa is aspartic acid, glutamic acid, cysteic acid, homoglutamic acid or homocysteic acid
  MISC_FEATURE (7)..(7): Xaa is Lys or Glu
  MISC_FEATURE (10)..(10): Xaa is Asp, Glu, cysteic acid, homoglutamic acid or homocysteic acid
  MISC_FEATURE (11)..(11): Xaa is Ala, Ser, Glu, Lys Gln, homoglutamic acid or homocysteic acid
  MISC_FEATURE (15)..(15): Xaa is Arg, Gln, Glu or Lys
  MISC_FEATURE (19)..(19): Xaa is Ala, Gln, Lys or Glu
  MISC_FEATURE (22)..(22): Xaa is Met, Leu or Nle
  MISC_FEATURE (23)..(23): Xaa is Asn, Lys or an acidic amino acid
  MISC_FEATURE (24)..(24): Xaa is Thr, Gly or an acidic amino acid
FTSXYSXYLXXRRAXDFVXWLXXX

SEQ ID NO: 1452 - protein, 6 aa, Artificial Sequence
  Synthetic Polypeptide
  MISC_FEATURE (6)..(6): Xaa is phenyl lactic acid
HSQGTX

SEQ ID NO: 1453 - protein, 5 aa, Artificial Sequence
  Synthetic Polypeptide
  MISC_FEATURE (5)..(5): Xaa is phenyl lactic acid
SQGTX

SEQ ID NO: 1454 - protein, 4 aa, Artificial Sequence
  Synthetic Polypeptide
  MISC_FEATURE (4)..(4): Xaa is phenyl lactic acid
QGTX

SEQ ID NO: 1455 - protein, 3 aa, Artificial Sequence
  Synthetic Polypeptide
  MISC_FEATURE (3)..(3): Xaa is phenyl lactic acid
GTX

SEQ ID NO: 1456 - protein, 2 aa, Artificial Sequence
  Synthetic Polypeptide
  MISC_FEATURE (2)..(2): Xaa is phenyl lactic acid
TX

SEQ ID NO: 1457 - protein, 6 aa, Artificial Sequence
  Synthetic Polypeptide
  MISC_FEATURE (1)..(1): Xaa is selected from a group consisting of His, D-histidine, alpha, alpha-dimethyl imidiazole acetic acid (DMIA), N-methyl histidine, alpha-methyl histidine, imidazole acetic acid, desaminohistidine, hydroxyl-histidine, acetyl-histidine and
  MISC_FEATURE (2)..(2): Xaa is selected from a group consisting of Ser, D-serine, D-alanine, Val, Gly, N-methyl serine, N-methyl alanine, and aminoisobutyric acid (AIB)
  MISC_FEATURE (3)..(3): Xaa is selected from a group consisting of Glu or Gln
  MISC_FEATURE (6)..(6): Xaa is phenyl lactic acid
XXXGTX

SEQ ID NO: 1458 - protein, 5 aa, Artificial Sequence
  Synthetic Polypeptide
  MISC_FEATURE (1)..(1): Xaa is selected from a group consisting of Ser, D-serine, D-alanine, Val, Gly, N-methyl serine, N-methyl alanine, and aminoisobutyric acid (AIB)
  MISC_FEATURE (2)..(2): Xaa is selected from a group consisting of Glu or Gln
  MISC_FEATURE (5)..(5): Xaa is phenyl lactic acid
XXGTX

SEQ ID NO: 1459 - protein, 4 aa, Artificial Sequence
  Synthetic Polypeptide
  MISC_FEATURE (1)..(1): Xaa is selected from a group consisting of Glu or Gln
  MISC_FEATURE (4)..(4): Xaa is phenyl lactic acid
XGTX

SEQ ID NO: 1460 - protein, 24 aa, Artificial Sequence
  Synthetic Polypeptide
  MOD_RES (1)..(1): N-terminal amino group replaced with hydroxy group
  MISC_FEATURE (11)..(15): Lactam bridge connecting residues 11 and 15
  MOD_RES (24)..(24): C-terminal alpha carboxylate replaced with amide
FTSDYSKYLDERRAKDFVQWLMDT

SEQ ID NO: 1461 - protein, 24 aa, Artificial Sequence
  Synthetic Polypeptide
  MOD_RES (1)..(1): N-terminal amino group replaced with hydroxy group
  MOD_RES (24)..(24): C-terminal alpha carboxylate replaced with amide
FTSEYSKYLDSRRAQDFVQWLMNT

SEQ ID NO: 1462 - protein, 24 aa, Artificial Sequence
  Synthetic Polypeptide
  MOD_RES (1)..(1): N-terminal amino group replaced with hydroxy group
  MISC_FEATURE (4)..(7): Lactam bridge connecting residues 4 and 7
  MOD_RES (24)..(24): C-terminal alpha carboxylate replaced with amide
FTSEYSKYLDSRRAQDFVQWLMNT

SEQ ID NO: 1463 - protein, 28 aa, Artificial Sequence
  Synthetic Polypeptide
  MISC_FEATURE (15)..(19): Lactam bridge connecting residues 15 and 19
  MOD_RES (28)..(28): C-terminal alpha carboxylate replaced with amide
AEGTFTSEYSKYLDERRAKDFVQWLMDT

SEQ ID NO: 1464 - protein, 28 aa, Artificial Sequence
  Synthetic Polypeptide
  MISC_FEATURE (4)..(5): Threonine in position 4 and phenyl lactic acid in position 5 are linked via ester bond
  MISC_FEATURE (5)..(5): Xaa is phenyl lactic acid
  MISC_FEATURE (15)..(19): Lactam bridge connecting residues 15 and 19
  MOD_RES (28)..(28): C-terminal alpha carboxylate replaced with amide
AEGTXTSDYSKYLDERRAKDFVQWLMDT

SEQ ID NO: 1465 - protein, 28 aa, Artificial Sequence
  Synthetic Polypeptide
  MISC_FEATURE (15)..(19): Lactam bridge connecting residues 15 and 19
  MOD_RES (28)..(28): C-terminal alpha carboxylate replaced with amide
SQGTFTSEYSKYLDERRAKDFVQWLMDT

SEQ ID NO: 1466 - protein, 28 aa, Artificial Sequence
  Synthetic Polypeptide
  MISC_FEATURE (4)..(5): Threonine in position 4 and phenyl lactic acid in position 5 are linked via ester bond
  MISC_FEATURE (5)..(5): Xaa is phenyl lactic acid
  MISC_FEATURE (15)..(19): Lactam bridge connecting residues 15 and 19
  MOD_RES (28)..(28): C-terminal alpha carboxylate replaced with amide
SQGTXTSDYSKYLDERRAKDFVQWLMDT

SEQ ID NO: 1467 - protein, 24 aa, Artificial Sequence
  Synthetic Polypeptide
  MOD_RES (1)..(1): N-terminal amino group replaced with hydroxy group
  MISC_FEATURE (5)..(5): Covalently linked to a cholesterol acid moiety
  MISC_FEATURE (11)..(15): Lactam bridge connecting residues 11 to 15
  MOD_RES (24)..(24): C-terminal alpha carboxylate replaced with amide
FTSDKSKYLDERRAKDFVQWLMDT

SEQ ID NO: 1468 - protein, 25 aa, Artificial Sequence
  Synthetic Polypeptide
  MOD_RES (1)..(1): N-terminal amino group replaced with hydroxy group
  MISC_FEATURE (11)..(15): Lactam bridge connecting residues 11 and 15
  MISC_FEATURE (25)..(25): Covalently linked to a cholesterol acid moiety
  MOD_RES (25)..(25): C-terminal alpha carboxylate replaced with amide
FTSDYSKYLDERRAKDFVQWLMDTK

SEQ ID NO: 1469 - protein, 35 aa, Artificial Sequence
  Synthetic Polypeptide
  MOD_RES (1)..(1): N-terminal amino group replaced with hydroxy group
  MISC_FEATURE (11)..(15): Lactam bridge connectiong residues 11 and 15
  MISC_FEATURE (35)..(35): Covalently linked to a cholesterol acid moiety
  MOD_RES (35)..(35): C-terminal alpha carboxylate replaced with amide
FTSDYSKYLDERRAKDFVQWLMDTGPSSGAPPPSK

SEQ ID NO: 1470 - protein, 28 aa, Artificial Sequence
  Synthetic Polypeptide
  MISC_FEATURE (1)..(1): Xaa is amino isobutyric acid
  MISC_FEATURE (4)..(5): Threonine in position 4 and phenyl lactic acid in position 5 are linked via ester bond
  MISC_FEATURE (5)..(5): Xaa is phenyl lactic acid
  MISC_FEATURE (15)..(19): Lactam bridge connectiong residues 15 and 19
  MOD_RES (28)..(28): C-terminal alpha carboxylate replaced with amide
XEGTXTSDYSKYLDERRAKDFVQWLMDT

SEQ ID NO: 1471 - protein, 34 aa, Artificial Sequence; identical to SEQ ID NO: 1428
  Synthetic Polypeptide
  MOD_RES (34)..(34): C-terminal alpha carboxylate replaced with amide

SEQ ID NO: 1472 - protein, 34 aa, Artificial Sequence; identical to SEQ ID NO: 1428
  Synthetic Polypeptide
  MOD_RES (1)..(1): N-terminal amino group replaced with hydroxy group
  MOD_RES (34)..(34): C-terminal alpha carboxylate replaced with amide

SEQ ID NO: 1473 - protein, 34 aa, Artificial Sequence; identical to SEQ ID NO: 1430
  Synthetic Polypeptide
  MISC_FEATURE (11)..(15): Lactam bridge connecting residues 11 and 15
  MOD_RES (34)..(34): C-terminal alpha carboxylate replaced with amide

SEQ ID NO: 1474 - protein, 34 aa, Artificial Sequence; identical to SEQ ID NO: 1430
  Synthetic Polypeptide
  MOD_RES (1)..(1): N-terminal amino group replaced with hydroxy group
  MISC_FEATURE (11)..(15): Lactam bridge connecting residues 11 and 15
  MOD_RES (34)..(34): C-termincal alpha carboxylate replaced with amide

SEQ ID NO: 1475 - protein, 24 aa, Artificial Sequence
  Synthetic Polypeptide
  MOD_RES (1)..(1): N-terminal amino group replaced with hydroxy group
  MISC_FEATURE (7)..(11): Lactam bridge connecting residues 7 and 11
  MOD_RES (24)..(24): C-terminal alpha carboxylate replaced with amide
FTSDYSKYLDERRAQDFVQWLMDT

SEQ ID NO: 1476 - protein, 24 aa, Artificial Sequence
  Synthetic Polypeptide
  MOD_RES (1)..(1): N-terminal amino group replaced with hydroxy group
  MISC_FEATURE (11)..(15): Lactam bridge connecting residues 11 and 15
  MOD_RES (24)..(24): C-terminal alpha carboxylate replaced with amide
FTSDYSKYLDERRAKDFVQWLMDT

SEQ ID NO: 1477 - protein, 24 aa, Artificial Sequence
  Synthetic Polypeptide
  MOD_RES (1)..(1): N-terminal amino group replaced with hydroxy group
  MISC_FEATURE (15)..(19): Lactam bridge connecting residues 15 and 19
  MOD_RES (24)..(24): C-terminal alpha carboxylate replaced with amide
FTSDYSKYLDERRAKDFVEWLMDT

SEQ ID NO: 1478 - protein, 24 aa, Artificial Sequence
  Synthetic Polypeptide
  MOD_RES (1)..(1): N-terminal amino group replaced with hydroxy group
  MISC_FEATURE (19)..(23): Lactam bridge connecting residues 19 and 23
  MOD_RES (24)..(24): C-terminal alpha carboxylate replaced with amide
FTSDYSKYLDERRAQDFVEWLMKT

SEQ ID NO: 1479 - protein, 24 aa, Artificial Sequence
  Synthetic Polypeptide
  MOD_RES (1)..(1): N-terminal amino group replaced with hydroxy group
  MISC_FEATURE (7)..(11): Lactam bridge connecting residues 7 and 11
  MOD_RES (24)..(24): C-terminal alpha carboxylate replaced with amide
FTSDYSKYLDEQAAKDFIAWLMDT

SEQ ID NO: 1480 - protein, 24 aa, Artificial Sequence
  Synthetic Polypeptide
  MOD_RES (1)..(1): N-terminal amino group replaced with hydroxy group
  MISC_FEATURE (11)..(15): Lactam bridge connecting residues 11 and 15
  MOD_RES (24)..(24): C-terminal alpha carboxylate replaced with amide
FTSDYSKYLDEQAAKEFIAWLMDT

SEQ ID NO: 1481 - protein, 28 aa, Artificial Sequence
  Synthetic Polypeptide
  MISC_FEATURE (15)..(19): Lactam bridge connecting residues 15 and 19
  MOD_RES (28)..(28): C-terminal alpha carboxylate replaced with amide
AEGTFTSEYSKYLDERRAKDFVQWLMDT

SEQ ID NO: 1482 - protein, 28 aa, Artificial Sequence
  Synthetic Polypeptide
  MISC_FEATURE (15)..(19): Lactam bridge connecting residues 15 and 19
  MOD_RES (28)..(28): C-terminal alpha carboxylate replaced with amide
AEGTFTSEYSKYLDEQAAKEFIAWLMDT

SEQ ID NO: 1483 - protein, 29 aa, Artificial Sequence
  Synthetic Polypeptide
  MISC_FEATURE (16)..(20): Lactam bridge connection residues 16 and 20
  MOD_RES (29)..(29): C-terminal alpha carboxylate replaced with amide
HAEGTFTSEYSKYLDERRAKDFVQWLMDT

SEQ ID NO: 1484 - protein, 29 aa, Artificial Sequence
  Synthetic Polypeptide
  MISC_FEATURE (16)..(20): Lactam bridge connecting bridges 16 and 20
  MOD_RES (29)..(29): C-terminal alpha carboxylate replaced with amide
HAEGTFTSEYSKYLDEQAAKEFIAWLMDT

SEQ ID NO: 1485 - protein, 26 aa, Artificial Sequence
  Synthetic Polypeptide
  MISC_FEATURE (13)..(17): Lactam bridge connecting residues 13 and 17
  MOD_RES (26)..(26): C-terminal alpha carboxylate replaced with amide
GTFTSEYSKYLDERRAKDFVQWLMDT

SEQ ID NO: 1486 - protein, 28 aa, Artificial Sequence
  Synthetic Polypeptide
  MISC_FEATURE (5)..(6): Threonine in position 5 and phenyl lactic acid in position 6 linked via ester bond
  MISC_FEATURE (15)..(19): Lactam bridge connecting residues 15 and 19
  MOD_RES (28)..(28): C-terminal alpha carboxylate replaced with amide
SQGTFTSEYSKYLDERRAKDFVQWLMDT

SEQ ID NO: 1487 - protein, 29 aa, Artificial Sequence
  Synthetic Polypeptide
  MISC_FEATURE (5)..(6): Threonine at position 5 and phenyl lactic acid at position 6 linked via ester bond
  MISC_FEATURE (6)..(6): Xaa is phenyl lactic acid
  MISC_FEATURE (16)..(20): Lactam bridge connecting residues 16 and 20
  MOD_RES (29)..(29): C-terminal alpha carboxylate replaced with amide
HAEGTXTSDYSKYLDERRAKDFVQWLMDT

SEQ ID NO: 1488 - protein, 24 aa, Artificial Sequence
  Synthetic Polypeptide
  MOD_RES (1)..(1): N-terminal amino group replaced with hydroxy group
  MISC_FEATURE (7)..(11): Lactam bridge connecting residues 7 and 11
  MOD_RES (19)..(19): Pegylated
  MOD_RES (24)..(24): C-terminal alpha carboxylate replaced with amide
FTSDYSKYLDERRAQDFVCWLMDT

SEQ ID NO: 1489 - protein, 35 aa, Artificial Sequence
  Synthetic Polypeptide
  MOD_RES (1)..(1): N-terminal amino group replaced with hydroxy group
  MISC_FEATURE (7)..(11): Lactam bridge connecting residues 7 and 11
  MOD_RES (35)..(35): Pegylated
  MOD_RES (35)..(35): C-terminal alpha carboxylate replaced with amide
FTSDYSKYLDERRAQDFVQWLMDTGPSSGAPPPSC

SEQ ID NO: 1490 - protein, 24 aa, Artificial Sequence
  Synthetic Polypeptide
  MOD_RES (1)..(1): N-terminal amino group replaced with hydroxy group
  MISC_FEATURE (11)..(15): Lactam bridge connecting residues 11 and 15
  MOD_RES (19)..(19): Pegylated
  MOD_RES (24)..(24): C-terminal alpha carboxylate replaced with amide
FTSDYSKYLDERRAKDFVCWLMDT

SEQ ID NO: 1491 - protein, 35 aa, Artificial Sequence
  Synthetic Polypeptide
  MOD_RES (1)..(1): N-terminal amino group replaced with hydroxy group
  MISC_FEATURE (11)..(15): Lactam bridge connecting residues 11 and 15
  MOD_RES (35)..(35): Pegylated
  MOD_RES (35)..(35): C-terminal alpha carboxylate replaced with amide
FTSDYSKYLDERRAKDFVQWLMDTGPSSGAPPPSC

SEQ ID NO: 1492 - protein, 24 aa, Artificial Sequence
  Synthetic Polypeptide
  MOD_RES (1)..(1): N-terminal amino group replaced with hydroxy group
  MOD_RES (1)..(1): Covalently attached to a C16 fatty acid
  MISC_FEATURE (11)..(15): Lactam bridge connection residues 11 and 15
  MOD_RES (24)..(24): C-terminal alpha carboxylate replaced with amide
FTSDYSKYLDERRAKDFVQWLMDT

SEQ ID NO: 1493 - protein, 24 aa, Artificial Sequence
  Synthetic Polypeptide
  MOD_RES (1)..(1): N-terminal amino group replaced with hydroxy group
  MOD_RES (5)..(5): Linked to a C16 fatty acid via Glu residue
  MISC_FEATURE (11)..(15): Lactam bridge connecting residues 11 and 15
  MISC_FEATURE (15)..(15): Linked to a C16 fatty acid via Glu residue
  MOD_RES (24)..(24): C-terminal alpha carboxylate replaced with amide
FTSDKSKYLDERRAKDFVQWLMDT

SEQ ID NO: 1494 - protein, 24 aa, Artificial Sequence
  Synthetic Polypeptide
  MOD_RES (1)..(1): N-terminal amino group replaced with hydroxy group
  MISC_FEATURE (15)..(15): Linked to C16 fatty acid via Glu residue
  MOD_RES (24)..(24): C-terminal alpha carboxylate replaced with amide
FTSDYSKYLDERRAKDFVQWLMDT

SEQ ID NO: 1495 - protein, 24 aa, Artificial Sequence
  Synthetic Polypeptide
  MOD_RES (1)..(1): N-terminal amino group replaced with hydroxy group
  MISC_FEATURE (11)..(15): Lactam bridge connecting residues 11 and 15
  MISC_FEATURE (19)..(19): Linked to a C16 fatty acid via Glu residue
  MOD_RES (24)..(24): C-terminal alpha carboxylate replaced with amide
FTSDYSKYLDERRAKDFVKWLMDT

SEQ ID NO: 1496 - protein, 24 aa, Artificial Sequence
  Synthetic Polypeptide
  MOD_RES (1)..(1): N-terminal amino group replaced with hydroxy group
  MISC_FEATURE (11)..(15): Lactam bridge connecting residues 11 and 15
  MISC_FEATURE (24)..(24): Linked to a C16 fatty acid via Glu residue
  MOD_RES (24)..(24): C-terminal alpha carboxylate replaced with amide
FTSDYSKYLDERRAKDFVQWLMDK

SEQ ID NO: 1497 - protein, 24 aa, Artificial Sequence
  Synthetic Polypeptide
  MOD_RES (1)..(1): N-terminal amino group replaced with hydroxy group
  MISC_FEATURE (11)..(11): Xaa is amino isobutyric acid
  MOD_RES (24)..(24): C-terminal alpha carboxylate replaced with amide
FTSDYSKYLDXRRAQDFVQWLMNT

SEQ ID NO: 1498 - protein, 24 aa, Artificial Sequence
  Synthetic Polypeptide
  MOD_RES (1)..(1): N-terminal amino group replaced with hydroxy group
  MISC_FEATURE (11)..(11)
  MISC_FEATURE (15)..(15): Xaa is alpha isobutyric acid
  MOD_RES (24)..(24): C-terminal alpha carboxylate replaced with amide
FTSDKSKYLDXRRAXDFVCWLMNT

SEQ ID NO: 1499 - protein, 24 aa, Artificial Sequence
  Synthetic Polypeptide
  MOD_RES (1)..(1): N-terminal amino group replaced with hydroxy group
  MOD_RES (24)..(24): C-terminal alpha carboxylate replaced with amide
FTSDYSKYLDERRAQDFVQWLMNT

SEQ ID NO: 1500 - protein, 24 aa, Artificial Sequence
  Synthetic Polypeptide
  MOD_RES (1)..(1): N-terminal amino group replaced with hydroxy group
  MOD_RES (24)..(24): C-terminal alpha carboxylate replaced with amide
FTSDKSKYLDERRAQDFVCWLMNT

SEQ ID NO: 1501 - protein, 24 aa, Artificial Sequence
  Synthetic Polypeptide
  MISC_FEATURE (4)..(7): Lactam bridge connecting residues 4 and 7
  MOD_RES (11)..(11): Xaa is alpha isobutyric acid
  MOD_RES (24)..(24): C-terminal carboxylate replaced with amide
FTSEYSKYLDXRRAQDFVQWLMNT

SEQ ID NO: 1502 - protein, 24 aa, Artificial Sequence
  Synthetic Polypeptide
  MISC_FEATURE (4)..(7): Lactam bridge connecting residues 4 and 7
  MOD_RES (11)..(11): Xaa is alpha isobutyric acid
  MOD_RES (24)..(24): C-terminal carboxylate replaced with amide
FTSEYSKYLDXRRAQDFVQWLMNT

SEQ ID NO: 1503 - protein, 24 aa, Artificial Sequence
  Synthetic Polypeptide
  MOD_RES (1)..(1): N-terminal amino group replaced with hydroxy group
  MISC_FEATURE (11)..(15): Lactam bridge connecting residues 11 and 15
  MOD_RES (24)..(24): C-terminal alpha carboxylate replaced with amide
FTSDYSKYLDERRAKEFVQWLMDT

SEQ ID NO: 1504 - protein, 24 aa, Artificial Sequence
  Synthetic Polypeptide
  MOD_RES (1)..(1): N-terminal amino group replaced with hydroxy group
  MOD_RES (24)..(24): C-terminal alpha carboxylate replaced with amide
FTSDYSKYLDEQAAKEFIAWLMNT

SEQ ID NO: 1505 - protein, 34 aa, Artificial Sequence; identical to SEQ ID NO: 1430
  Synthetic Polypeptide
  MOD_RES (34)..(34): C-terminal alpha carboxylate replaced with amide

SEQ ID NO: 1506 - protein, 24 aa, Artificial Sequence
  Synthetic Polypeptide
  MOD_RES (1)..(1): N-terminal amino group replaced with hydroxy group
  MISC_FEATURE (5)..(5): Linked to a C16 fatty acid via Glu residue
  MISC_FEATURE (7)..(7): Linked to a C16 fatty acid via Glu residue
  MOD_RES (24)..(24): C-terminal carboxylate replaced with amide
FTSDKSKYLDERRAKDFVQWLMDT

SEQ ID NO: 1507 - protein, 6 aa, Artificial Sequence
  Synthetic Polypeptide
  MISC_FEATURE (1)..(1): Xaa1 is selected from a group consisting of His, D-histidine, alpha, alpha-dimethyl imidiazole acetic acid (DMIA), N-methyl histidine, alpha-methyl histidine, imidazole acetic acid, desaminohistidine, hydroxyl-histidine, acetyl-histidine and
  MISC_FEATURE (2)..(2): Xaa is selected from a group consisting of Ser, D-serine, D-alanine, valine, glycine, N-methyl serine, and aminoisobutyric acid (AIB)
  MISC_FEATURE (3)..(3): Xaa is selected from a group consisting of Glu or Gln
XXXTGF

SEQ ID NO: 1508 - protein, 5 aa, Artificial Sequence
  Synthetic Polypeptide
  MISC_FEATURE (1)..(1): Xaa is selected from a group consisting of Ser, D-serine, D-alanine, valine, glycine, N-methyl serine, and aminoisobutyric acid (AIB)
  MISC_FEATURE (2)..(2): Xaa is selected from a group consisting of Glu or Gln
XXTGF

SEQ ID NO: 1509 - protein, 4 aa, Artificial Sequence
  Synthetic Polypeptide
  MISC_FEATURE (1)..(1): Xaa is selected from a group consisting of Glu or Gln
XTGF

SEQ ID NO: 1510 - protein, 24 aa, Artificial Sequence
  Synthetic Polypeptide
  MOD_RES (1)..(1): N-terminal amino group replaced with hydroxy group
  MOD_RES (24)..(24): C-terminal alpha carboxylate replaced with amide
FTSDYSKYLDSRRAQDFVQWLMDT

SEQ ID NO: 1511 - protein, 28 aa, Artificial Sequence
  Synthetic Polypeptide
  MOD_RES (28)..(28): C-terminal alpha carboxylate replaced with amide
SQGTFTSEYSKYLDSRRAQDFVQWLMNT

SEQ ID NO: 1512 - protein, 28 aa, Artificial Sequence
  Synthetic Polypeptide
  MISC_FEATURE (4)..(5): Threonine at position 4 and phenyl lactic acid at position 5 linked via ester bond
  MISC_FEATURE (5)..(5): Xaa is phenyl lactic acid
  MOD_RES (28)..(28): C-terminal alpha carboxylate replaced with amide
SQGTXTSEYSKYLDSRRAQDFVQWLMNT

SEQ ID NO: 1513 - protein, 29 aa, Artificial Sequence
  Synthetic Polypeptide
  MISC_FEATURE (5)..(6): Threorine at position 5 and phenyl lactic acid at position 6 linked via ester bond
  MISC_FEATURE (6)..(6): Xaa is phenyl lactic acid
  MOD_RES (29)..(29): C-terminal alpha carboxylate replaced with amide
HSQGTXTSEYSKYLDSRRAQDFVQWLMNT

SEQ ID NO: 1514 - protein, 24 aa, Artificial Sequence
  Synthetic Polypeptide
  MOD_RES (1)..(1): N-terminal amino group replaced with hydroxy group
  MISC_FEATURE (11)..(15): Lactam bridge connecting residues 11 and 15
  MOD_RES (19)..(19): Pegylated
  MOD_RES (24)..(24): C-terminal alpha carboxylate replaced with amide
FTSEYSKYLDERRAKDFVCWLMNT

SEQ ID NO: 1515 - protein, 24 aa, Artificial Sequence
  Synthetic Polypeptide
  MOD_RES (1)..(1): N-terminal amino group replaced with hydroxy group
  MISC_FEATURE (11)..(15): Lactam bridge connecting residues 11 and 15
  MISC_FEATURE (19)..(19): Pegylated via spacer
  MOD_RES (24)..(24): C-terminal alpha carboxylate replaced with amide
FTSDYSKYLDERRAKDFVKWLMDT

SEQ ID NO: 1516 - protein, 24 aa, Artificial Sequence
  Synthetic Polypeptide
  MOD_RES (1)..(1): N-terminal amino group replaced with hydroxy group
  MISC_FEATURE (11)..(15): Lactam bridge connecting residues 11 and 15
  MOD_RES (19)..(19): Pegylated via rigid spacer
  MOD_RES (24)..(24): C-terminal alpha carboxylate replaced with amide
FTSDYSKYLDERRAKDFVKWLMDT

SEQ ID NO: 1517 - protein, 35 aa, Artificial Sequence
  Synthetic Polypeptide
  MISC_FEATURE (1)..(1): N-terminal amino group replaced with hydroxy group
  MISC_FEATURE (11)..(15): Lactam bridge connecting residues 11 and 15
  MOD_RES (35)..(35): Pegylated
  MOD_RES (35)..(35): C-terminal alpha carboxylate replaced with amide
FTSDYSKYLDERRAKDFVQWLMDTGPGPGPGPGPC

SEQ ID NO: 1518 - protein, 35 aa, Artificial Sequence
  Synthetic Polypeptide
  MOD_RES (1)..(1): N-terminal amino group replaced with hydroxy group
  MISC_FEATURE (11)..(15): Lactam bridge connecting residues 11 and 15
  MOD_RES (35)..(35): Pegylated
  MOD_RES (35)..(35): C-terminal alpha carboxylate reaplaced with amide
FTSDYSKYLDERRAKDFVQWLMDGGPSSGAPPPSC

SEQ ID NO: 1519-1700 - skipped (182 entries)

SEQ ID NO: 1701 - protein, 29 aa, Artificial Sequence
  Synthetic peptide
  MOD_RES (2)..(2): Xaa is AIB
  misc_feature (16)..(16): Xaa can be any naturally occurring amino acid
  misc_feature (20)..(20): Xaa can be any naturally occurring amino acid
  MOD_RES (29)..(29): C-terminal amidation
HSQGTFTSDYSKYLDXQAAXGFIAWLMNT

SEQ ID NO: 1702 - protein, 29 aa, Artificial Sequence
  Synthetic peptide
  MOD_RES (2)..(2): Xaa is AIB
  MOD_RES (10)..(10): Acylated with C16 fatty acyl group
  MOD_RES (16)..(16): Xaa is AIB
  MOD_RES (29)..(29): C-terminal amidation
HXQGTFTSDKSKYLDXRAAQDFVQWLMDT

SEQ ID NO: 1703 - protein, 29 aa, Artificial Sequence
  Synthetic peptide
  MOD_RES (2)..(2): Xaa is AIB
  MOD_RES (10)..(10): Acylated with C14 fatty acyl group via dipeptide spacer
  MOD_RES (16)..(16): Xaa is AIB
  MOD_RES (29)..(29): C-terminal amidation
HXQGTFTSDKSKYLDXRAAQDFVQWLMDT

SEQ ID NO: 1704 - protein, 29 aa, Artificial Sequence
  Synthetic peptide
  MOD_RES (2)..(2): Xaa is AIB
  MOD_RES (10)..(10): Acylated with C18 fatty acyl group via dipeptide spacer
  MOD_RES (16)..(16): Xaa is AIB
  MOD_RES (29)..(29): C-terminal amidation
HXQGTFTSDKSKYLDXRAAQDFVQWLMDT

SEQ ID NO: 1705 - protein, 29 aa, Artificial Sequence
  Synthetic peptide
  MOD_RES (1)..(10): Acylated with C16 fatty acyl group via dipeptide spacer
  MOD_RES (2)..(2): Xaa is AIB
  MOD_RES (16)..(16): Xaa is AIB
  MOD_RES (29)..(29): C-terminal amidation
HXEGTFTSDKSKYLDXRAAQDFVQWLMDT

SEQ ID NO: 1706 - protein, 29 aa, Artificial Sequence
  Synthetic peptide
  MOD_RES (2)..(2): Xaa is AIB
  MOD_RES (10)..(10): Acylated with C16 fatty acyl group via dipeptide spacer
  MOD_RES (16)..(16): Xaa is AIB
HXQGTFISDKSKYLDXRAAQDFVQWLMDT

SEQ ID NO: 1707 - protein, 29 aa, Artificial Sequence
  Synthetic peptide
  MOD_RES (2)..(2): Xaa is AIB
  MOD_RES (10)..(10): Acylated with C16 fatty acyl group via dipeptide spacer
  MOD_RES (29)..(29): C-terminal amidation
HXQGTFTSDKSKYLDERAAQDFVQWLMDT

SEQ ID NO: 1708 - protein, 29 aa, Artificial Sequence
  Synthetic peptide
  MOD_RES (2)..(2): Xaa is AIB
  MOD_RES (10)..(10): Acylated with C16 fatty acyl group via dipeptide spacer
  MOD_RES (16)..(16): Xaa is AIB
  MOD_RES (29)..(29): C-terminal amidation
HXQGTFTSDKSKYLEXRAAQDFVQWLMDT

SEQ ID NO: 1709 - protein, 29 aa, Artificial Sequence
  Synthetic peptide
  MOD_RES (2)..(2): d-Ser
  MOD_RES (10)..(10): Acylated with C16 fatty acyl group via dipeptide spacer
  MOD_RES (16)..(16): Xaa is AIB
  MOD_RES (29)..(29): C-terminal amidation
HSQGTFTSDKSKYLDXRAAQDFVQWLMDT

SEQ ID NO: 1710 - protein, 29 aa, Artificial Sequence
  Synthetic peptide
  MOD_RES (2)..(2): Xaa is AIB
  MOD_RES (10)..(10): Acylated with C16 fatty acyl group via dipeptide spacer
  MOD_RES (16)..(16): Xaa is AIB
  MOD_RES (29)..(29): C-terminal amidation
HXQGTFTSDKSKYLDXRAAQDFVQWLLDT

SEQ ID NO: 1711 - protein, 29 aa, Artificial Sequence
  Synthetic peptide
  MOD_RES (2)..(2): Xaa is AIB
  MOD_RES (10)..(10): Acylated with C16 fatty acyl group via dipeptide spacer
  MOD_RES (29)..(29): C-terminal amidation
HXQGTFTSDKSKYLDEQAAKEFIAWLLDT

SEQ ID NO: 1712 - protein, 29 aa, Artificial Sequence
  Synthetic peptide
  MOD_RES (2)..(2): Xaa is AIB
  MOD_RES (10)..(10): Acylated with C16 fatty acyl group via gamma-Glu spacer
  MOD_RES (29)..(29): C-terminal amidation
HXQGTFTSDKSKYLDEQAAKEFICWLLDT

SEQ ID NO: 1713 - protein, 29 aa, Artificial Sequence
  Synthetic peptide
  MOD_RES (2)..(2): Xaa is AIB
  MOD_RES (10)..(10): Acylated with C16 fatty acyl group via gamma-Glu spacer
  MOD_RES (24)..(24): PEGYLATION
  MOD_RES (29)..(29): C-terminal amidation
HXQGTFTSDKSKYLDEQAAKEFICWLLDT

SEQ ID NO: 1714 - protein, 29 aa, Artificial Sequence
  Synthetic peptide
  MOD_RES (2)..(2): Xaa is AIB
  MOD_RES (10)..(10): Acylated with C16 fatty acyl group via gamma-Glu spacer
  MOD_RES (24)..(24): PEGYLATION
  MOD_RES (29)..(29): C-terminal amidation
HXQGTFTSDKSKYLDERAAQDFVCWLLDT

SEQ ID NO: 1715 - protein, 30 aa, Artificial Sequence
  Synthetic peptide
  MOD_RES (2)..(2): Xaa is AIB
  MOD_RES (10)..(10): Acylated with C16 fatty acyl group via gamma-Glu spacer
  MOD_RES (30)..(30): PEGYLATION
  MOD_RES (30)..(30): C-terminal amidation
HXQGTFTSDKSKYLDEQAAKEFIQWLLDTC

SEQ ID NO: 1716 - protein, 29 aa, Artificial Sequence
  Synthetic peptide
  MOD_RES (10)..(10): Acylated with C16 fatty acyl group via gamma-Glu spacer
  MOD_RES (24)..(24): PEGYLATION
  MOD_RES (29)..(29): C-terminal amidation
HAQGTFTSDKSKYLDERAAQDFVCWLLDT

SEQ ID NO: 1717 - protein, 29 aa, Artificial Sequence
  Synthetic peptide
  MOD_RES (2)..(2): d-Ser
  MOD_RES (10)..(10): Acylated with C16 fatty acyl group via gamma-Glu spacer
  MOD_RES (29)..(29): C-terminal amidation
HSQGTFTSDKSKYLDEQAAKEFICWLLDT

SEQ ID NO: 1718 - protein, 29 aa, Artificial Sequence
  Synthetic peptide
  MOD_RES (2)..(2): d-Ser
  MOD_RES (10)..(10): Acylated with C16 fatty acyl group via gamma-Glu spacer
  MOD_RES (29)..(29): C-terminal amidation
HSQGTFTSDKSKYLDERAAQDFVQWLLDT

SEQ ID NO: 1719 - protein, 29 aa, Artificial Sequence
  Synthetic peptide
  MOD_RES (2)..(2): d-Ser
  MOD_RES (10)..(10): Acylated with C16 fatty acyl group via gamma-Glu spacer
  MOD_RES (29)..(29): C-terminal amidation
HSQGTFTSDKSKYLDERAAQDFVCWLLDT

SEQ ID NO: 1720 - protein, 29 aa, Artificial Sequence
  Synthetic peptide
  MOD_RES (2)..(2): d-Ser
  MOD_RES (10)..(10): Acylated with C16 fatty acyl group via gamma-Glu spacer
HSQGTFTSDKSKYLDEQAAKEFICWLLDT

SEQ ID NO: 1721 - protein, 31 aa, Artificial Sequence
  Synthetic peptide
  MOD_RES (2)..(2): d-Ser
  MOD_RES (10)..(10): Acylated with C16 fatty acyl group via gamma-Glu spacer
  MOD_RES (31)..(31): C-terminal amidation
HSQGTFTSDKSKYLDEQAAKEFICWLLDTGE

SEQ ID NO: 1722 - protein, 31 aa, Artificial Sequence
  Synthetic peptide
  MOD_RES (2)..(2): d-Ser
  MOD_RES (10)..(10): Acylated with C16 fatty acyl group via gamma-Glu spacer
  MOD_RES (24)..(24): PEGYLATION
HSQGTFTSDKSKYLDEQAAKEFICWLLDTGG

SEQ ID NO: 1723 - protein, 29 aa, Artificial Sequence
  Synthetic peptide
  MOD_RES (2)..(2): d-Ser
  MOD_RES (10)..(10): Acylated with C16 fatty acyl group via gamma-Glu spacer
  MOD_RES (24)..(24): PEGYLATION
  MOD_RES (29)..(29): C-terminal amidation
HSQGTFTSDKSKYLDERAAQDFVCWLLDT

SEQ ID NO: 1724 - protein, 30 aa, Artificial Sequence
  Synthetic peptide
  MOD_RES (2)..(2): d-Ser
  MOD_RES (10)..(10): Acylated with C16 fatty acyl group via gamma-Glu spacer
  MOD_RES (30)..(30): PEGYLATION
  MOD_RES (30)..(30): C-terminal amidation
HSQGTFTSDKSKYLDERAAQDFVQWLLDTC

SEQ ID NO: 1725 - protein, 30 aa, Artificial Sequence
  Synthetic peptide
  MOD_RES (2)..(2): d-Ser
  MOD_RES (10)..(10): Acylated with C16 fatty acyl group via gamma-Glu spacer
  MOD_RES (24)..(24): PEGYLATION
  MOD_RES (30)..(30): C-terminal amidation
HSQGTFTSDYSKYLDSRRAQDFVQWLMNTE

SEQ ID NO: 1726 - protein, 30 aa, Artificial Sequence
  Synthetic peptide
  MOD_RES (2)..(2): d-Ser
  MOD_RES (10)..(10): Acylated with C16 fatty acyl group via gamma-Glu spacer
  MOD_RES (24)..(24): PEGYLATION
HSQGTFTSDKSKYLDEQAAKEFICWLLDTC

SEQ ID NO: 1727 - protein, 29 aa, Artificial Sequence
  Synthetic peptide
  MOD_RES (1)..(1): Xaa is DMIA
  MOD_RES (10)..(10): Acylated with C16 fatty acyl group via gamma-Glu spacer
  MOD_RES (29)..(29): C-terminal amidation
XSQGTFTSDKSKYLDEQAAKEFICWLLDT

SEQ ID NO: 1728 - protein, 29 aa, Artificial Sequence
  Synthetic peptide
  MOD_RES (1)..(1): des-amino-His
  MOD_RES (10)..(10): Acylated with C16 fatty acyl group via gamma-Glu spacer
  MOD_RES (29)..(29): C-terminal amidation
HSQGTFTSDKSKYLDEQAAKEFICWLLDT

SEQ ID NO: 1729 - protein, 29 aa, Artificial Sequence
  Synthetic peptide
  MOD_RES (1)..(1): Ac-His
  MOD_RES (10)..(10): Acylated with C16 fatty acyl group via gamma-Glu spacer
  MOD_RES (24)..(24): PEGYLATION
  MOD_RES (29)..(29): C-terminal amidation
HSQGTFTSDKSKYLDEQAAKEFICWLLDT

SEQ ID NO: 1730 - protein, 29 aa, Artificial Sequence
  Synthetic peptide
  MOD_RES (2)..(2): Xaa is AIB
  MOD_RES (10)..(10): Acylated with C16 fatty acyl group via gamma-Glu spacer
  MOD_RES (29)..(29): C-terminal amidation
HXQGTFTSDKSKYLDEEAVRLFIEWLMNT

SEQ ID NO: 1731 - protein, 29 aa, Artificial Sequence
  Synthetic peptide
  MOD_RES (2)..(2): Xaa is AIB
  MOD_RES (10)..(10): Acylated with C16 fatty acyl group
  MOD_RES (29)..(29): C-terminal amidation
HXQGTFTSDKSKYLDEEAVRLFIEWLMNT

SEQ ID NO: 1732 - protein, 29 aa, Artificial Sequence
  Synthetic peptide
  MOD_RES (2)..(2): Xaa is AIB
  MOD_RES (24)..(24): PEGYLATION
  MOD_RES (29)..(29): C-terminal amidation
HXQGTFTSDYSKYLDEEAVRLFICWLMNT

SEQ ID NO: 1733 - protein, 29 aa, Artificial Sequence
  Synthetic peptide
  MOD_RES (2)..(2): Xaa is AIB
  MOD_RES (29)..(29): C-terminal amidation
HXQGTFTSDYSKYLDEEAVRLFIEWLMNT

SEQ ID NO: 1734 - protein, 29 aa, Artificial Sequence
  Synthetic peptide
  MOD_RES (2)..(2): Xaa is AIB
  MOD_RES (29)..(29): C-terminal amidation
HXQGTFTSDYSKYLDEEAVRLFICWLMNT

SEQ ID NO: 1735 - protein, 29 aa, Artificial Sequence
  Synthetic peptide
  MOD_RES (2)..(2): d-Ser
  MOD_RES (24)..(24): PEGYLATION
  MOD_RES (29)..(29): C-terminal amidation
HSQGTFTSDYSKYLDEEAVRLFICWLMNT

SEQ ID NO: 1736 - protein, 29 aa, Artificial Sequence
  Synthetic peptide
  MOD_RES (2)..(2): d-Ser
  MOD_RES (29)..(29): C-terminal amidation
HSQGTFTSDYSKYLDEEAVRLFIEWLMNT

SEQ ID NO: 1737 - protein, 29 aa, Artificial Sequence
  Synthetic peptide
  MOD_RES (2)..(2): d-Ser
  MOD_RES (29)..(29): C-terminal amidation
HSQGTFTSDYSKYLDEEAVRLFICWLMNT

SEQ ID NO: 1738 - protein, 29 aa, Artificial Sequence
  Synthetic peptide
  MOD_RES (10)..(10): Acylated with C16 fatty acyl group via acidic amino acid spacer
  MOD_RES (29)..(29): C-terminal amidation
HSQGTFTSDKSKYLDEEAVRLFIEWLMNT

SEQ ID NO: 1739 - protein, 29 aa, Artificial Sequence
  Synthetic peptide
  MOD_RES (10)..(10): Acylated with C16 fatty acyl group via gamma-Glu spacer
  MOD_RES (29)..(29): C-terminal amidation
HSQGTFTSDKSKYLDEEAVRLFIEWLMNT

SEQ ID NO: 1740 - protein, 29 aa, Artificial Sequence
  Synthetic peptide
  MOD_RES (2)..(2): Xaa is AIB
  MISC_FEATURE (16)..(20): Salt bridge
  MISC_FEATURE (17)..(21): Salt bridge
  MOD_RES (24)..(24): PEGYLATION
  MOD_RES (29)..(29): C-terminal amidation
HXQGTFTSDYSKYLDEKRAKEFVCWLMNT

SEQ ID NO: 1741 - protein, 29 aa, Artificial Sequence
  Synthetic peptide
  MOD_RES (2)..(2): Xaa is AIB
  MOD_RES (16)..(16): Xaa is AIB
  MISC_FEATURE (16)..(20): Salt bridge
  MISC_FEATURE (17)..(21): Salt bridge
  MOD_RES (24)..(24): PEGYLATION
  MOD_RES (29)..(29): C-terminal amidation
HXQGTFTSDYSKYLDXKRAKEFVCWLMNT

SEQ ID NO: 1742 - protein, 29 aa, Artificial Sequence
  Synthetic peptide
  MOD_RES (2)..(2): d-Ser
  MISC_FEATURE (16)..(20): Salt bridge
  MISC_FEATURE (17)..(21): Salt bridge
  MOD_RES (24)..(24): PEGYLATION
  MOD_RES (29)..(29): C-terminal amidation
HSQGTFTSDYSKYLDEKRAKEFVCWLMNT

SEQ ID NO: 1743 - protein, 29 aa, Artificial Sequence
  Synthetic peptide
  MOD_RES (2)..(2): d-Ser
  MOD_RES (16)..(16): Xaa is AIB
  MISC_FEATURE (16)..(20): Salt bridge
  MISC_FEATURE (17)..(21): Salt bridge
  MOD_RES (24)..(24): PEGYLATION
  MOD_RES (29)..(29): C-terminal amidation
HSQGTFTSDYSKYLDXKRAKEFVCWLMNT

SEQ ID NO: 1744 - protein, 29 aa, Artificial Sequence
  Synthetic peptide
  MOD_RES (2)..(2): d-Ser
  MISC_FEATURE (16)..(20): Salt bridge
  MISC_FEATURE (17)..(21): Salt bridge
  MOD_RES (29)..(29): C-terminal amidation
HSQGTFTSDYSKYLDEKRAKEFVQWLMNT

SEQ ID NO: 1745 - protein, 29 aa, Artificial Sequence
  Synthetic peptide
  MOD_RES (2)..(2): D-serine, D-alanine, valine, amino n-butyric acid, glycine, N-methyl serine, aminoisobutyric acid
  MOD_RES (16)..(16): Xaa is AIB
  MISC_FEATURE (16)..(20): Salt bridge
  MISC_FEATURE (17)..(21): Salt bridge
  MOD_RES (29)..(29): C-terminal amidation
HSQGTFTSDYSKYLDXKRAKEFVQWLMNT

SEQ ID NO: 1746 - protein, 29 aa, Artificial Sequence
  Synthetic peptide
  MOD_RES (2)..(2): D-serine, D-alanine, valine, amino n-butyric acid, glycine, N-methyl serine, aminoisobutyric acid
  MOD_RES (10)..(10): Acylated with C16 fatty acyl group via gamma-Glu spacer
  MISC_FEATURE (15)..(20): Salt bridge
  MOD_RES (16)..(16): Xaa is AIB
  MISC_FEATURE (16)..(21): Salt bridge
  MOD_RES (29)..(29): C-terminal amidation
HSQGTFTSDKSKYLDXKRAKEFVQWLMNT

SEQ ID NO: 1747 - protein, 29 aa, Artificial Sequence
  Synthetic peptide
  MOD_RES (1)..(1): Xaa is DMIA
  MOD_RES (16)..(16): Xaa is AIB
  MISC_FEATURE (16)..(20): Salt bridge
  MISC_FEATURE (17)..(21): Salt bridge
  MOD_RES (24)..(24): PEGYLATION
  MOD_RES (29)..(29): C-terminal amidation
XSQGTFTSDYSKYLDXKRAKEFVCWLMNT

SEQ ID NO: 1748 - protein, 29 aa, Artificial Sequence
  Synthetic peptide
  MISC_FEATURE (16)..(20): Salt bridge
  MISC_FEATURE (17)..(21): Salt bridge
  MOD_RES (29)..(29): C-terminal amidation
HSQGTFTSDYSKYLDEKRAKEFVQWLMNT

SEQ ID NO: 1749 - protein, 29 aa, Artificial Sequence
  Synthetic peptide
  MOD_RES (2)..(2): D-serine, D-alanine, valine, amino n-butyric acid, glycine, N-methyl serine, aminoisobutyric acid
  MOD_RES (10)..(10): Acylated with C16 fatty acyl group via dipeptide spacer
  MOD_RES (16)..(16): Xaa is AIB
  MOD_RES (29)..(29): C-terminal amidation
HXQGTFTSDKSKYLDXRAAQDFVQWLMDT

SEQ ID NO: 1750 - protein, 29 aa, Artificial Sequence
  Synthetic peptide
  MOD_RES (2)..(2): Xaa is AIB
  MOD_RES (10)..(10): Acylated with C16 fatty acyl group via acidic amino acid spacer
  MOD_RES (29)..(29): C-terminal amidation
HXQGTFTSDKSKYLDEQAAKEFICWLLDT

SEQ ID NO: 1751 - protein, 29 aa, Artificial Sequence
  Synthetic peptide
  MOD_RES (2)..(2): Xaa is AIB
  MOD_RES (10)..(10): Acylated with C16 fatty acyl group via acidic amino acid spacer
  MOD_RES (24)..(24): PEGYLATION
  MOD_RES (29)..(29): C-terminal amidation
HXQGTFTSDKSKYLDEQAAKEFICWLLDT

SEQ ID NO: 1752 - protein, 29 aa, Artificial Sequence
  Synthetic peptide
  MOD_RES (2)..(2): Xaa is AIB
  MOD_RES (10)..(10): Acylated with C16 fatty acyl group via acidic amino acid spacer
  MOD_RES (24)..(24): PEGYLATION
  MOD_RES (29)..(29): C-terminal amidation
HXQGTFTSDKSKYLDERAAQDFVCWLLDT

SEQ ID NO: 1753 - protein, 30 aa, Artificial Sequence; identical to SEQ ID NO: 1715
  Synthetic peptide
  MOD_RES (2)..(2): Xaa is AIB
  MOD_RES (10)..(10): Acylated with C16 fatty acyl group via acidic amino acid spacer
  MOD_RES (30)..(30): PEGYLATION
  MOD_RES (30)..(30): C-terminal amidation

SEQ ID NO: 1754 - protein, 29 aa, Artificial Sequence
  Synthetic peptide
  MOD_RES (10)..(10): Acylated with C16 fatty acyl group via acidic amino acid spacer
  MOD_RES (24)..(24): PEGYLATION
  MOD_RES (29)..(29): C-terminal amidation
HAQGTFTSDKSKYLDERAAQDFVCWLLDT

SEQ ID NO: 1755 - protein, 29 aa, Artificial Sequence
  Synthetic peptide
  MOD_RES (2)..(2): D-serine, D-alanine, valine, amino n-butyric acid, glycine, N-methyl serine, aminoisobutyric acid
  MOD_RES (10)..(10): Acylated with C16 fatty acyl group via acidic amino acid spacer
  MOD_RES (29)..(29): C-terminal amidation
HXQGTFTSDKSKYLDEQAAKEFICWLLDT

SEQ ID NO: 1756 - protein, 29 aa, Artificial Sequence
  Synthetic peptide
  MOD_RES (2)..(2): D-serine, D-alanine, valine, amino n-butyric acid, glycine, N-methyl serine, aminoisobutyric acid
  MOD_RES (10)..(10): Acylated with C16 fatty acyl group via acidic amino acid spacer
  MOD_RES (29)..(29): C-terminal amidation
HXQGTFTSDKSKYLDERAAQDFVQWLLDT

SEQ ID NO: 1757 - protein, 29 aa, Artificial Sequence
  Synthetic peptide
  MOD_RES (2)..(2): D-serine, D-alanine, valine, amino n-butyric acid, glycine, N-methyl serine, aminoisobutyric acid
  MOD_RES (10)..(10): Acylated with C16 fatty acyl group via acidic amino acid spacer
  MOD_RES (29)..(29): C-terminal amidation
HXQGTFTSDKSKYLDERAAQDFVCWLLDT

SEQ ID NO: 1758 - protein, 29 aa, Artificial Sequence
  Synthetic peptide
  MOD_RES (2)..(2): D-serine, D-alanine, valine, amino n-butyric acid, glycine, N-methyl serine, aminoisobutyric acid
  MOD_RES (10)..(10): Acylated with C16 fatty acyl group via acidic amino acid spacer
HXQGTFTSDKSKYLDEQAAKEFICWLLDT

SEQ ID NO: 1759 - protein, 31 aa, Artificial Sequence
  Synthetic peptide
  MOD_RES (2)..(2): D-serine, D-alanine, valine, amino n-butyric acid, glycine, N-methyl serine, aminoisobutyric acid
  MOD_RES (10)..(10): Acylated with C16 fatty acyl group via acidic amino acid spacer
  MOD_RES (31)..(31): C-terminal amidation
HXQGTFTSDKSKYLDEQAAKEFICWLLDTGE

SEQ ID NO: 1760 - protein, 31 aa, Artificial Sequence
  Synthetic peptide
  MOD_RES (2)..(2): D-serine, D-alanine, valine, amino n-butyric acid, glycine, N-methyl serine, aminoisobutyric acid
  MOD_RES (10)..(10): Acylated with C16 fatty acyl group via acidic amino acid spacer
  MOD_RES (24)..(24): PEGYLATION
HXQGTFTSDKSKYLDEQAAKEFICWLLDTGG

SEQ ID NO: 1761 - protein, 29 aa, Artificial Sequence
  Synthetic peptide
  MOD_RES (2)..(2): D-serine, D-alanine, valine, amino n-butyric acid, glycine, N-methyl serine, aminoisobutyric acid
  MOD_RES (10)..(10): Acylated with C16 fatty acyl group via acidic amino acid spacer
  MOD_RES (24)..(24): PEGYLATION
  MOD_RES (29)..(29): C-terminal amidation
HXQGTFTSDKSKYLDERAAQDFVCWLLDT

SEQ ID NO: 1762 - protein, 30 aa, Artificial Sequence
  Synthetic peptide
  MOD_RES (2)..(2): D-serine, D-alanine, valine, amino n-butyric acid, glycine, N-methyl serine, aminoisobutyric acid
  MOD_RES (10)..(10): Acylated with C16 fatty acyl group via acidic amino acid spacer
  MOD_RES (30)..(30): PEGYLATION
  MOD_RES (30)..(30): C-terminal amidation
HXQGTFTSDKSKYLDERAAQDFVQWLLDTC

SEQ ID NO: 1763 - protein, 30 aa, Artificial Sequence
  Synthetic peptide
  MOD_RES (2)..(2): D-serine, D-alanine, valine, amino n-butyric acid, glycine, N-methyl serine, aminoisobutyric acid
  MOD_RES (10)..(10): Acylated with C16 fatty acyl group via acidic amino acid spacer
  MOD_RES (24)..(24): PEGYLATION
  MOD_RES (30)..(30): C-terminal amidation
HXQGTFTSDYSKYLDSRRAQDFVQWLMNTE

SEQ ID NO: 1764 - protein, 30 aa, Artificial Sequence
  Synthetic peptide
  MOD_RES (2)..(2): D-serine, D-alanine, valine, amino n-butyric acid, glycine, N-methyl serine, aminoisobutyric acid
  MOD_RES (10)..(10): Acylated with C16 fatty acyl group via acidic amino acid spacer
  MOD_RES (24)..(24): PEGYLATION
HXQGTFTSDKSKYLDEQAAKEFICWLLDTC

SEQ ID NO: 1765 - protein, 29 aa, Artificial Sequence
  Synthetic peptide
  MOD_RES (1)..(1): Xaa is DMIA
  MOD_RES (10)..(10): Acylated with C16 fatty acyl group via acidic amino acid spacer
  MOD_RES (29)..(29): C-terminal amidation
XSQGTFTSDKSKYLDEQAAKEFICWLLDT

SEQ ID NO: 1766 - protein, 29 aa, Artificial Sequence
  Synthetic peptide
  MOD_RES (1)..(1): des-amino-His
  MOD_RES (10)..(10): Acylated with C16 fatty acyl group via acidic amino acid spacer
  MOD_RES (29)..(29): C-terminal amidation
HSQGTFTSDKSKYLDEQAAKEFICWLLDT

SEQ ID NO: 1767 - protein, 29 aa, Artificial Sequence
  Synthetic peptide
  MOD_RES (1)..(1): Ac-His
  MOD_RES (10)..(10): Acylated with C16 fatty acyl group via acidic amino acid spacer
  MOD_RES (24)..(24): PEGYLATION
  MOD_RES (29)..(29): C-terminal amidation
HSQGTFTSDKSKYLDEQAAKEFICWLLDT

SEQ ID NO: 1768 - protein, 29 aa, Artificial Sequence
  Synthetic peptide
  MOD_RES (2)..(2): Xaa is AIB
  MOD_RES (10)..(10): Acylated with C16 fatty acyl group via acidic amino acid spacer
  MOD_RES (29)..(29): C-terminal amidation
HXQGTFTSDKSKYLDEEAVRLFIEWLMNT

SEQ ID NO: 1769 - protein, 29 aa, Artificial Sequence
  Synthetic peptide
  MOD_RES (2)..(2): D-serine, D-alanine, valine, amino n-butyric acid, glycine, N-methyl serine, aminoisobutyric acid
  MOD_RES (24)..(24): PEGYLATION
  MOD_RES (29)..(29): C-terminal amidation
HXQGTFTSDYSKYLDEEAVRLFICWLMNT

SEQ ID NO: 1770 - protein, 29 aa, Artificial Sequence
  Synthetic peptide
  MOD_RES (2)..(2): D-serine, D-alanine, valine, amino n-butyric acid, glycine, N-methyl serine, aminoisobutyric acid
  MOD_RES (29)..(29): C-terminal amidation
HXQGTFTSDYSKYLDEEAVRLFIEWLMNT

SEQ ID NO: 1771 - protein, 29 aa, Artificial Sequence
  Synthetic peptide
  MOD_RES (2)..(2): D-serine, D-alanine, valine, amino n-butyric acid, glycine, N-methyl serine, aminoisobutyric acid
  MOD_RES (29)..(29): C-terminal amidation
HXQGTFTSDYSKYLDEEAVRLFICWLMNT

SEQ ID NO: 1772 - protein, 29 aa, Artificial Sequence
  Synthetic peptide
  MOD_RES (10)..(10): Acylated with C16 fatty acyl group via acidic amino acid spacer
  MOD_RES (29)..(29): C-terminal amidation
HSQGTFTSDKSKYLDEEAVRLFIEWLMNT

SEQ ID NO: 1773 - protein, 29 aa, Artificial Sequence
  Synthetic peptide
  MOD_RES (2)..(2): D-serine, D-alanine, valine, amino n-butyric acid, glycine, N-methyl serine, aminoisobutyric acid
  MISC_FEATURE (16)..(20): Salt bridge
  MISC_FEATURE (17)..(21): Salt bridge
  MOD_RES (24)..(24): PEGYLATION
  MOD_RES (29)..(29): C-terminal amidation
HXQGTFTSDYSKYLDEKRAKEFVCWLMNT

SEQ ID NO: 1774 - protein, 29 aa, Artificial Sequence
  Synthetic peptide
  MOD_RES (2)..(2): D-serine, D-alanine, valine, amino n-butyric acid, glycine, N-methyl serine, aminoisobutyric acid
  MOD_RES (16)..(16): Xaa is AIB
  MISC_FEATURE (16)..(20): Salt bridge
  MISC_FEATURE (17)..(21): Salt bridge
  MOD_RES (24)..(24): PEGYLATION
  MOD_RES (29)..(29): C-terminal amidation
HSQGTFTSDYSKYLDXKRAKEFVCWLMNT

SEQ ID NO: 1775 - protein, 29 aa, Artificial Sequence
  Synthetic peptide
  MOD_RES (2)..(2): D-serine, D-alanine, valine, amino n-butyric acid, glycine, N-methyl serine, aminoisobutyric acid
  MISC_FEATURE (16)..(20): Salt bridge
  MISC_FEATURE (17)..(21): Salt bridge
  MOD_RES (29)..(29): C-terminal amidation
HSQGTFTSDYSKYLDEKRAKEFVQWLMNT

SEQ ID NO: 1776 - protein, 29 aa, Artificial Sequence
  Synthetic peptide
  MOD_RES (2)..(2): D-serine, D-alanine, valine, amino n-butyric acid, glycine, N-methyl serine, aminoisobutyric acid
  MOD_RES (10)..(10): Acylated with C16 fatty acyl group via acidic amino acid spacer
  MISC_FEATURE (15)..(20): Salt bridge
  MOD_RES (16)..(16): Xaa is AIB
  MISC_FEATURE (16)..(21): Salt bridge
  MOD_RES (29)..(29): C-terminal amidation
HSQGTFTSDKSKYLDXKRAKEFVQWLMNT

SEQ ID NO: 1777-1800 - skipped (24 entries)

SEQ ID NO: 1801 - protein, 37 aa, Homo sapiens
HSQGTFTSDYSKYLDSRRAQDFVQWLMNTKRNRNNIA

SEQ ID NO: 1802 - protein, 37 aa, Artificial Sequence
  OXM analog
HSEGTFTSDYSKYLDSRRAQDFVQWLMNTKRNRNNIA

SEQ ID NO: 1803 - protein, 37 aa, Artificial Sequence
  OXM analog
HSDGTFTSDYSKYLDSRRAQDFVQWLMNTKRNRNNIA

SEQ ID NO: 1804 - protein, 38 aa, Artificial Sequence
  OXM analog
  MOD_RES (2)..(2): Xaa=Aminoisobutyric acid
  MOD_RES (38)..(38): C-terminal amidation
HXQGTFTSDYSKYLDSRRAQDFVQWLMNTKRNRNNIAC

SEQ ID NO: 1805 - protein, 38 aa, Artificial Sequence
  OXM analog
  MOD_RES (2)..(2): Xaa=D-serine
  MOD_RES (38)..(38): Xaa=Cys(mPEG)5kDa
  MOD_RES (38)..(38): C-terminal amidation
HXQGTFTSDYSKYLDSRRAQDFVQWLMNTKRNRNNIAX

SEQ ID NO: 1806 - protein, 38 aa, Artificial Sequence; identical to SEQ ID NO: 1805
  OXM analog
  MOD_RES (2)..(2): Xaa=D-serine
  MOD_RES (38)..(38): Xaa=Cys(mPEG)20kDa
  MOD_RES (38)..(38): C-terminal amidation

SEQ ID NO: 1807 - protein, 38 aa, Artificial Sequence; identical to SEQ ID NO: 1805
  OXM analog
  MOD_RES (2)..(2): Xaa=D-serine
  MOD_RES (38)..(38): Xaa=Cys(mPEG)2 40kDa
  MOD_RES (38)..(38): C-terminal amidation

SEQ ID NO: 1808 - protein, 38 aa, Artificial Sequence; identical to SEQ ID NO: 1805
  OXM analog
  MOD_RES (2)..(2): Xaa=D-serine
  MOD_RES (38)..(38): Xaa=Cys(9cholest-5-en-3-yl{[(2R)-3-amino-2-(amino) -3-oxopropyl]thio}acetate)
  MOD_RES (38)..(38): C-terminal amidation

SEQ ID NO: 1809 - protein, 38 aa, Artificial Sequence; identical to SEQ ID NO: 1805
  OXM analog
  MOD_RES (2)..(2): Xaa=Aminoisobutyric acid
  MOD_RES (38)..(38): Xaa=Cys(mPEG)5kDa
  MOD_RES (38)..(38): C-terminal amidation

SEQ ID NO: 1810 - protein, 38 aa, Artificial Sequence; identical to SEQ ID NO: 1805
  OXM analog
  MOD_RES (2)..(2): Xaa=aminoisobutyric acid
  MOD_RES (38)..(38): Xaa=Cys(mPEG)20kDa
  MOD_RES (38)..(38): C-terminal amidation

SEQ ID NO: 1811 - protein, 38 aa, Artificial Sequence; identical to SEQ ID NO: 1805
  OXM analog
  MOD_RES (2)..(2): X=aminoisobutyric acid
  MOD_RES (38)..(38): Xaa=Cys(mPEG)2 40kDa
  MOD_RES (38)..(38): C-terminal amidation

SEQ ID NO: 1812 - protein, 38 aa, Artificial Sequence; identical to SEQ ID NO: 1805
  OXM analog
  MOD_RES (2)..(2): Xaa=aminoisobutyric acid
  MOD_RES (38)..(38): Xaa=Cys(cholest-5-en-3-yl{[(2R)-3-amino-2-(amino)- 3-oxopropyl]thio}acetate)
  MOD_RES (38)..(38): C-terminal amidation

SEQ ID NO: 1813 - protein, 38 aa, Artificial Sequence
  OXM analog
  MOD_RES (2)..(2): Xaa=aminoisobutyric acid
  MOD_RES (27)..(27): Xaa=methionine sulfoxide
  MOD_RES (38)..(38): Xaa=Cys(mPEG)240kDa
  MOD_RES (38)..(38): C-terminal amidation
HXQGTFTSDYSKYLDSRRAQDFVQWLXNTKRNRNNIAX

SEQ ID NO: 1814 - protein, 38 aa, Artificial Sequence; identical to SEQ ID NO: 1813
  OXM analog
  MOD_RES (2)..(2): Xaa=Aib
  MOD_RES (27)..(27): Xaa=methionine sulfoxide
  MOD_RES (38)..(38): Xaa=Cys(mPEG)260kDa
  MOD_RES (38)..(38): C-terminal amidation

SEQ ID NO: 1815 - protein, 37 aa, Artificial Sequence
  OXM analog
  MOD_RES (2)..(2): Xaa=Aib
  MOD_RES (20)..(20): Xaa=Cys(mPEG)240kDa
  MOD_RES (37)..(37): C-terminal amidation
HXQGTFTSDYSKYLDSRRAXDFVQWLMNTKRNRNNIA

SEQ ID NO: 1816 - protein, 37 aa, Artificial Sequence
  OXM analog
  MOD_RES (2)..(2): Xaa=Aib
  MOD_RES (21)..(21): Xaa=Cys(mPEG)240kDa
  MOD_RES (37)..(37): C-terminal amidation
HXQGTFTSDYSKYLDSRRAQXFVQWLMNTKRNRNNIA

SEQ ID NO: 1817 - protein, 37 aa, Artificial Sequence
  OXM analog
  MOD_RES (2)..(2): Aib
  MOD_RES (24)..(24): Xaa=Cys(mPEG)240kDa
  MOD_RES (27)..(27): Xaa=metionine sulfoxide
  MOD_RES (37)..(37): C-terminal amidation
HXQGTFTSDYSKYLDSRRAQDFVXWLXNTKRNRNNIA

SEQ ID NO: 1818 - protein, 37 aa, Artificial Sequence
  OXM analog
  MOD_RES (2)..(2): Xaa=Aib
  MOD_RES (28)..(28): Xaa=Cys(mPEG)240kDa
  MOD_RES (37)..(37): C-terminal amidation
HXQGTFTSDYSKYLDSRRAQDFVQWLMXTKRNRNNIA

SEQ ID NO: 1819 - protein, 38 aa, Artificial Sequence; identical to SEQ ID NO: 1805
  OXM analog
  MOD_RES (2)..(2): Xaa=D-serine
  MOD_RES (38)..(38): Xaa=Lys(palmitoyl)
  MOD_RES (38)..(38): C-terminal amidation

SEQ ID NO: 1820 - protein, 38 aa, Artificial Sequence
  OXM analog
  MOD_RES (1)..(1): Xaa=desamino-His (deltaNH2-H)
  MOD_RES (2)..(2): Xaa=Aib
  MOD_RES (27)..(27): Xaa=mrtionine sulfoxide
  MOD_RES (38)..(38): Xaa=Cys(mPEG)240kDa
  MOD_RES (38)..(38): C-terminal amidation
XXQGTFTSDYSKYLDSRRAQDFVQWLXNTKRNRNNIAX

SEQ ID NO: 1821 - protein, 38 aa, Artificial Sequence; identical to SEQ ID NO: 1805
  OXM analog
  MOD_RES (2)..(2): xaa=D-serine
  MOD_RES (38)..(38): Xaa=Cys(cholest-5-en-3-yl 1-{[(2R)-3-amino-2-(amino)-3-oxopropyl]thio}-2-oxo -6,9,12,15-tetraoxa-3-azaoctadecan-18-oate]) or Cys(Oxa4-cholesterol))
  MOD_RES (38)..(38): C-terminal amidation

SEQ ID NO: 1822 - protein, 37 aa, Artificial Sequence
  OXM analog
  MOD_RES (2)..(2): Xaa=Aib
  MOD_RES (11)..(11): Xaa=Cys(mPEG)240kDa
  MOD_RES (27)..(27): Xaa=methionine sulfoxide
  MOD_RES (37)..(37): C-terminal amidation
HXQGTFTSDYXKYLDSRRAQDFVQWLXNTKRNRNNIA

SEQ ID NO: 1823 - protein, 37 aa, Artificial Sequence
  OXM analog
  MOD_RES (2)..(2): Xaa=Aib
  MOD_RES (12)..(12): Xaa=Cys(mPEG)240kDa
  MOD_RES (27)..(27): Xaa=Methionine sulfoxide
  MOD_RES (37)..(37): C-terminal amidation
HXQGTFTSDYSXYLDSRRAQDFVQWLXNTKRNRNNIA

SEQ ID NO: 1824 - protein, 38 aa, Artificial Sequence; identical to SEQ ID NO: 1805
  OXM analog
  MOD_RES (2)..(2): Xaa=Aib
  MOD_RES (38)..(38): Xaa=Lys(palmitoyl)
  MOD_RES (38)..(38): C-terminal amidation

SEQ ID NO: 1825 - protein, 38 aa, Artificial Sequence
  OXM analog
  MOD_RES (2)..(2): Xaa=Aib
  MOD_RES (27)..(27): Xaa=Nle
  MOD_RES (38)..(38): C-terminal amidation
HXQGTFTSDYSKYLDSRRAQDFVQWLXNTKRNRNNIAC

SEQ ID NO: 1826 - protein, 38 aa, Artificial Sequence; identical to SEQ ID NO: 1825
  OXM analog
  MOD_RES (2)..(2): Xaa=Aib
  MOD_RES (27)..(27): Xaa=O-methyl-L-homoserine
  MOD_RES (38)..(38): C-terminal amidation

SEQ ID NO: 1827 - protein, 38 aa, Artificial Sequence; identical to SEQ ID NO: 1813
  OXM analog
  MOD_RES (2)..(2): Xaa=Aib
  MOD_RES (27)..(27): Xaa=Nle
  MOD_RES (38)..(38): Xaa=Cys(cholest-5-en-3-yl{[(2R)-3-amino-2-(amino)- 3-oxopropyl]thio}acetate)
  MOD_RES (38)..(38): C-terminal amidation

SEQ ID NO: 1828 - protein, 38 aa, Artificial Sequence; identical to SEQ ID NO: 1813
  OXM analog
  MOD_RES (2)..(2): Xaa=Aib
  MOD_RES (27)..(27): Xaa=O-methyl-L-homoserine
  MOD_RES (38)..(38): Xaa=Cys(cholest-5-en-3-yl{[(2R)-3-amino-2-(amino)- 3-oxopropyl]thio}acetate)
  MOD_RES (38)..(38): C-terminal amidation

SEQ ID NO: 1829 - protein, 38 aa, Artificial Sequence; identical to SEQ ID NO: 1805
  OXM analog
  MOD_RES (2)..(2): Xaa=Aib
  MOD_RES (38)..(38): Xaa=Cys(cholest-5-en-3-yl 1-{[(2R)-3-amino-2-(amino)-3-oxopropyl]thio}-2-oxo -6,9,12,15-tetraoxa-3-azaoctadecan-18-oate]) or Cys(Oxa4-cholesterol))
  MOD_RES (38)..(38): C-terminal amidation

SEQ ID NO: 1830 - protein, 38 aa, Artificial Sequence; identical to SEQ ID NO: 1804
  OXM analog
  MOD_RES (2)..(2): Xaa=D-serine
  MOD_RES (38)..(38): C-terminal amidation

SEQ ID NO: 1831 - protein, 38 aa, Artificial Sequence; identical to SEQ ID NO: 1813
  OXM analog
  MOD_RES (2)..(2): Xaa=D-serine
  MOD_RES (27)..(27): Xaa=metionine sulfoxide
  MOD_RES (38)..(38): Xaa=Cys(cholest-5-en-3-yl 1-{[(2R)-3-amino-2-(amino)-3-oxopropyl]thio}-2-oxo -6,9,12,15-tetraoxa-3-azaoctadecan-18-oate]) or Cys(Oxa4-cholesterol))
  MOD_RES (38)..(38): C-terminal amidation

SEQ ID NO: 1832 - protein, 38 aa, Artificial Sequence; identical to SEQ ID NO: 1813
  OXM analog
  MOD_RES (2)..(2): Xaa=D-serine
  MOD_RES (27)..(27): Xaa=methionine sulfoxide
  MOD_RES (38)..(38): Xaa=Cys(CH2CONH2)
  MOD_RES (38)..(38): C-terminal amidation

SEQ ID NO: 1833 - protein, 37 aa, Artificial Sequence
  OXM analog
  MOD_RES (2)..(2): Xaa=1-Amino-1-cyclohexane carboxylic acid
  MOD_RES (37)..(37): C-terminal amidation
HXQGTFTSDYSKYLDSRRAQDFVQWLMNTKRNRNNIA

SEQ ID NO: 1834 - protein, 37 aa, Artificial Sequence; identical to SEQ ID NO: 1833
  OXM analog
  MOD_RES (2)..(2): Xaa=Abu
  MOD_RES (37)..(37): C-terminal amidation

SEQ ID NO: 1835 - protein, 37 aa, Artificial Sequence; identical to SEQ ID NO: 1833
  OXM analog
  MOD_RES (2)..(2): Xaa=D-abu
  MOD_RES (37)..(37): C-terminal amidation

SEQ ID NO: 1836 - protein, 37 aa, Artificial Sequence; identical to SEQ ID NO: 1833
  OXM analog
  MOD_RES (2)..(2): Xaa=Nva (Aminovaleric acid)
  MOD_RES (37)..(37): C-terminal amidation

SEQ ID NO: 1837 - protein, 37 aa, Artificial Sequence; identical to SEQ ID NO: 1833
  OXM analog
  MOD_RES (2)..(2): Xaa= beta-cyclopropyl-alanine
  MOD_RES (37)..(37): C-terminal amidation

SEQ ID NO: 1838 - protein, 37 aa, Artificial Sequence; identical to SEQ ID NO: 1833
  OXM analog
  MOD_RES (2)..(2): Xaa=propargylglycine
  MOD_RES (37)..(37): C-terminal amidation

SEQ ID NO: 1839 - protein, 37 aa, Artificial Sequence; identical to SEQ ID NO: 1833
  OXM analog
  MOD_RES (2)..(2): Xaa=Allylglycine
  MOD_RES (37)..(37): C-terminal amidation

SEQ ID NO: 1840 - protein, 37 aa, Artificial Sequence; identical to SEQ ID NO: 1833
  OXM analog
  MOD_RES (2)..(2): Xaa=2-Amino-2-cyclohexyl-propanoic acid
  MOD_RES (37)..(37): C-terminal amidation

SEQ ID NO: 1841 - protein, 37 aa, Artificial Sequence; identical to SEQ ID NO: 1833
  OXM analog
  MOD_RES (2)..(2): Xaa=D-tertbutylglycine
  MOD_RES (37)..(37): C-terminal amidation

SEQ ID NO: 1842 - protein, 37 aa, Artificial Sequence; identical to SEQ ID NO: 1833
  OXM analog
  MOD_RES (2)..(2): Xaa=Vinylglycine
  MOD_RES (37)..(37): C-terminal amidation

SEQ ID NO: 1843 - protein, 37 aa, Artificial Sequence; identical to SEQ ID NO: 1833
  OXM analog
  MOD_RES (2)..(2): Xaa=1-Amino-1-cyclopropane carboxylic acid
  MOD_RES (37)..(37): C-terminal amidation

SEQ ID NO: 1844 - protein, 37 aa, Artificial Sequence; identical to SEQ ID NO: 1833
  OXM analog
  MOD_RES (2)..(2): Xaa=1-Amino-1-cyclobutane carboxylic acid
  MOD_RES (37)..(37): C-terminal amidation

SEQ ID NO: 1845 - protein, 37 aa, Artificial Sequence; identical to SEQ ID NO: 1833
  OXM analog
  MOD_RES (2)..(2): Xaa=1-Amino-1-cyclopentane carboxylic acid
  MOD_RES (37)..(37): C-terminal amidation

SEQ ID NO: 1846 - protein, 38 aa, Artificial Sequence
  OXM analog
  MOD_RES (2)..(2): Xaa=D-serine
  MOD_RES (38)..(38): C-terminal amidation
HXQGTFTSDYSKYLDSEAAQDFVQWLMNTKRNRNNIAC

SEQ ID NO: 1847 - protein, 31 aa, Artificial Sequence
  OXM analog
  MOD_RES (2)..(2): Xaa=D-serine
  MOD_RES (31)..(31): C-terminal amidation
HXQGTFTSDYSKYLDSRRAQDFVQWLMNTKC

SEQ ID NO: 1848 - protein, 31 aa, Artificial Sequence
  OXM analog
  MOD_RES (2)..(2): Xaa=D-serine
  MOD_RES (31)..(31): C-terminal amidation
HXQGTFTSDYSKYLDSEAAQDFVQWLMNTKC

SEQ ID NO: 1849 - protein, 31 aa, Artificial Sequence
  OXM analog
  MOD_RES (2)..(2): Xaa=D-serine
  MOD_RES (31)..(31): C-terminal amidation
HXQGTFTSDYSKYLDSERAQDFVQWLMNTKC

SEQ ID NO: 1850 - protein, 31 aa, Artificial Sequence
  OXM analog
  MOD_RES (2)..(2): Xaa=D-serine
  MOD_RES (31)..(31): C-terminal amidation
HXQGTFTSDYSKYLDSRAAQDFVQWLMNTKC

SEQ ID NO: 1851 - protein, 38 aa, Artificial Sequence
  OXM analog
  MOD_RES (2)..(2): Xaa=D-serine
  MOD_RES (38)..(38): Xaa=Cys(cholest-5-en-3-yl 1-{[(2R)-3-amino-2-(amino)-3-oxopropyl]thio}-2-oxo -6,9,12,15-tetraoxa-3-azaoctadecan-18-oate]) or Cys(Oxa4-cholesterol))
  MOD_RES (38)..(38): C-terminal amidation
HXQGTFTSDYSKYLDSEAAQDFVQWLMNTKRNRNNIAX

SEQ ID NO: 1852 - protein, 31 aa, Artificial Sequence
  OXM analog
  MOD_RES (2)..(2): Xaa=D-serine
  MOD_RES (31)..(31): Xaa=Cys(cholest-5-en-3-yl 1-{[(2R)-3-amino-2-(amino)-3-oxopropyl]thio}-2-oxo -6,9,12,15-tetraoxa-3-azaoctadecan-18-oate]) or Cys(Oxa4-cholesterol))
  MOD_RES (31)..(31): C-terminal amidation
HXQGTFTSDYSKYLDSRRAQDFVQWLMNTKX

SEQ ID NO: 1853 - protein, 31 aa, Artificial Sequence
  OXM analog
  MOD_RES (2)..(2): X=D-serine
  MOD_RES (31)..(31): Xaa=Cys(cholest-5-en-3-yl 1-{[(2R)-3-amino-2-(amino)-3-oxopropyl]thio}-2-oxo -6,9,12,15-tetraoxa-3-azaoctadecan-18-oate]) or Cys(Oxa4-cholesterol))
  MOD_RES (31)..(31): C-terminal amidation
HXQGTFTSDYSKYLDSEAAQDFVQWLMNTKX

SEQ ID NO: 1854 - protein, 31 aa, Artificial Sequence
  OXM analog
  MOD_RES (2)..(2): Xaa=D-serine
  MOD_RES (31)..(31): Xaa=Cys(cholest-5-en-3-yl 1-{[(2R)-3-amino-2-(amino)-3-oxopropyl]thio}-2-oxo -6,9,12,15-tetraoxa-3-azaoctadecan-18-oate]) or Cys(Oxa4-cholesterol))
  MOD_RES (31)..(31): C-terminal amidation
HXQGTFTSDYSKYLDSERAQDFVQWLMNTKX

SEQ ID NO: 1855 - protein, 31 aa, Artificial Sequence
  OXM analog
  MOD_RES (2)..(2): Xaa=D-serine
  MOD_RES (31)..(31): Xaa=Cys(cholest-5-en-3-yl 1-{[(2R)-3-amino-2-(amino)-3-oxopropyl]thio}-2-oxo -6,9,12,15-tetraoxa-3-azaoctadecan-18-oate]) or Cys(Oxa4-cholesterol))
  MOD_RES (31)..(31): C-terminal amidation
HXQGTFTSDYSKYLDSRAAQDFVQWLMNTKX

SEQ ID NO: 1856 - protein, 31 aa, Artificial Sequence; identical to SEQ ID NO: 1852
  OXM analog
  MOD_RES (2)..(2): Xaa=D-serine
  MOD_RES (31)..(31): Xaa=Lys(Palmitoyl)
  MOD_RES (31)..(31): C-terminal amidation

SEQ ID NO: 1857 - protein, 31 aa, Artificial Sequence; identical to SEQ ID NO: 1853
  OXM analog
  MOD_RES (2)..(2): Xaa=D-serine
  MOD_RES (31)..(31): Xaa=Lys(palmitoyl)
  MOD_RES (31)..(31): C-terminal amidation

SEQ ID NO: 1858 - protein, 32 aa, Artificial Sequence
  OXM analog
  MOD_RES (2)..(2): Xaa=D-serine
  MOD_RES (31)..(31): Xaa=Ttds
  MOD_RES (32)..(32): Xaa=Lys(Palmitoyl)
  MOD_RES (32)..(32): C-terminal amidation
HXQGTFTSDYSKYLDSRRAQDFVQWLMNTKXX

SEQ ID NO: 1859 - protein, 32 aa, Artificial Sequence
  OXM analog
  MOD_RES (2)..(2): Xaa=D-serine
  MOD_RES (31)..(31): Xaa=Ttds
  MOD_RES (32)..(32): Xaa=Lys(Palmitoyl)
  MOD_RES (32)..(32): C-terminal amidation
HXQGTFTSDYSKYLDSEAAQDFVQWLMNTKXX

SEQ ID NO: 1860 - protein, 32 aa, Artificial Sequence; identical to SEQ ID NO: 1858
  OXM analog
  MOD_RES (2)..(2): Xaa=D-serine
  MOD_RES (31)..(31): Xaa=gamma glutamic acid
  MOD_RES (32)..(32): Xaa=Cys(cholest-5-en-3-yl{[(2R)-3-amino-2-(amino)- 3-oxopropyl]thio}acetate)
  MOD_RES (32)..(32): C-terminal amidation

SEQ ID NO: 1861 - protein, 32 aa, Artificial Sequence; identical to SEQ ID NO: 1859
  OXM analog
  MOD_RES (2)..(2): Xaa=D-serine
  MOD_RES (31)..(31): Xaa=gamma glutamic acid
  MOD_RES (32)..(32): Xaa=Cys(cholest-5-en-3-yl{[(2R)-3-amino-2-(amino)- 3-oxopropyl]thio}acetate)
  MOD_RES (32)..(32): C-terminal amidation

SEQ ID NO: 1862 - protein, 31 aa, Artificial Sequence; identical to SEQ ID NO: 1853
  OXM analog
  MOD_RES (2)..(2): Xaa=Aib
  MOD_RES (31)..(31): Xaa= Cys(cholest-5-en-3-yl 1-{[(2R)-3-amino-2-(amino)-3-oxopropyl]thio}-2-oxo -6,9,12,15-tetraoxa-3-azaoctadecan-18-oate]) or Cys(Oxa4-cholesterol))
  MOD_RES (31)..(31): C-terminal amidation

SEQ ID NO: 1863 - protein, 39 aa, Artificial Sequence
  OXM analog
  MOD_RES (2)..(2): Xaa=D-serine
  MOD_RES (38)..(38): Xaa=gamma glutamic acid
  MOD_RES (39)..(39): Xaa=Cys(cholest-5-en-3-yl{[(2R)-3-amino-2-(amino)- 3-oxopropyl]thio}acetate)
  MOD_RES (39)..(39): C-terminal amidation
HXQGTFTSDYSKYLDSEAAQDFVQWLMNTKRNRNNIAXX

SEQ ID NO: 1864 - protein, 32 aa, Artificial Sequence
  OXM analog
  MOD_RES (2)..(2): Xaa=D-serine
  MOD_RES (32)..(32): Xaa=Cys(cholest-5-en-3-yl 1-{[(2R)-3-amino-2-(amino)-3-oxopropyl]thio}-2-oxo -6,9,12,15-tetraoxa-3-azaoctadecan-18-oate]) or Cys(Oxa4-cholesterol))
  MOD_RES (32)..(32): C-terminal amidation
HXQGTFTSDYSKYLDSEAAQDFVQWLMNTKRX

SEQ ID NO: 1865 - protein, 38 aa, Artificial Sequence; identical to SEQ ID NO: 1851
  OXM analog
  MOD_RES (2)..(2): Xaa=D-serine
  MOD_RES (38)..(38): Xaa=Cys(cholest-5-en-3-yl 1-{[(2R)-3-amino-2-(amino)-3-oxopropyl]thio}-2-oxo -6,9,12,15-tetraoxa-3-azaoctadecan-18-oate]) or Cys(Oxa4-cholesterol))

SEQ ID NO: 1866 - protein, 31 aa, Artificial Sequence; identical to SEQ ID NO: 1854
  OXM analog
  MOD_RES (2)..(2): Xaa=Aib
  MOD_RES (31)..(31): Xaa=Cys(cholest-5-en-3-yl 1-{[(2R)-3-amino-2-(amino)-3-oxopropyl]thio}-2-oxo -6,9,12,15-tetraoxa-3-azaoctadecan-18-oate]) or Cys(Oxa4-cholesterol))
  MOD_RES (31)..(31): C-terminal amidation

SEQ ID NO: 1867 - protein, 32 aa, Artificial Sequence; identical to SEQ ID NO: 1858
  OXM analog
  MOD_RES (2)..(2): Xaa=Aib
  MOD_RES (31)..(31): Xaa=gamma glutamic acid
  MOD_RES (32)..(32): Xaa=Cys(cholest-5-en-3-yl{[(2R)-3-amino-2-(amino)- 3-oxopropyl]thio}acetate)

SEQ ID NO: 1868 - protein, 39 aa, Artificial Sequence; identical to SEQ ID NO: 1863
  OXM analog
  MOD_RES (2)..(2): Xaa=D-serine
  MOD_RES (38)..(38): Xaa=gamma glutamic acid
  MOD_RES (39)..(39): Xaa=Lys(Palmitoyl)
  MOD_RES (39)..(39): C-terminal amidation

SEQ ID NO: 1869 - protein, 33 aa, Artificial Sequence
  OXM analog
  MOD_RES (2)..(2): Xaa=D-serine
  MOD_RES (31)..(32): Xaa=gamma glutamic acid
  MOD_RES (33)..(33): Xaa=Cys(cholest-5-en-3-yl{[(2R)-3-amino-2-(amino)- 3-oxopropyl]thio}acetate)
HXQGTFTSDYSKYLDSRRAQDFVQWLMNTKXXX

SEQ ID NO: 1870 - protein, 32 aa, Artificial Sequence
  OXM analog
  MOD_RES (2)..(2): Xaa=D-serine
  MOD_RES (31)..(31): Xaa=gamma glutamic acid
  MOD_RES (32)..(32): Xaa=Cys(cholest-5-en-3-yl 1{[(2R)-3-amino-2-(amino)-3-oxopropyl]thio}acetate )
HXQGTFTSDYSSYLDSRRAQDFVQWLMNTKXX

SEQ ID NO: 1871 - protein, 32 aa, Artificial Sequence
  OXM analog
  MOD_RES (2)..(2): Xaa=D-serine
  MOD_RES (31)..(31): Xaa=gamma glutamic acid
  MOD_RES (32)..(32): Xaa=Cys(cholest-5-en-3-yl 1{[(2R)-3-amino-2-(amino)-3-oxopropyl]thio}acetate );
HXQGTFTSDYSKYLDSRAAQDFVQWLMNTKXX

SEQ ID NO: 1872 - protein, 32 aa, Artificial Sequence; identical to SEQ ID NO: 1870
  OXM analog
  MOD_RES (2)..(2): Xaa=D-serine
  MOD_RES (31)..(31): Xaa=gamma glutamic acid
  MOD_RES (32)..(32): Xaa=Cys(cholest-5-en-3-yl 1-{[(2R)-3-amino-2-(amino)-3-oxopropyl]thio}-2-oxo -6,9,12,15-tetraoxa-3-azaoctadecan-18-oate]) or Cys(Oxa4-cholesterol)

SEQ ID NO: 1873 - protein, 32 aa, Artificial Sequence; identical to SEQ ID NO: 1871
  OXM analog
  MOD_RES (2)..(2): Xaa=D-serine
  MOD_RES (31)..(31): Xaa=gamma glutamic acid
  MOD_RES (32)..(32): Xaa=Cys(cholest-5-en-3-yl 1-{[(2R)-3-amino-2-(amino)-3-oxopropyl]thio}-2-oxo -6,9,12,15-tetraoxa-3-azaoctadecan-18-oate]) or Cys(Oxa4-cholesterol)

SEQ ID NO: 1874 - protein, 32 aa, Artificial Sequence
  OXM analog
  MOD_RES (2)..(2): Xaa=D-serine
  MOD_RES (31)..(31): Xaa=gamma glutamic acid
  MOD_RES (32)..(32): Xaa=Cys(cholest-5-en-3-yl 1{[(2R)-3-amino-2-(amino)-3-oxopropyl]thio}acetate )
HXQGTFTSDYSKYLDERRAQDFVQWLMNTKXX

SEQ ID NO: 1875 - protein, 32 aa, Artificial Sequence; identical to SEQ ID NO: 1874
  OXM analog
  MOD_RES (2)..(2): Xaa=D-serine
  MOD_RES (31)..(31): Xaa=gamma glutamic acid
  MOD_RES (32)..(32): Xaa=Cys(cholest-5-en-3-yl 1-{[(2R)-3-amino-2-(amino)-3-oxopropyl]thio}-2-oxo -6,9,12,15-tetraoxa-3-azaoctadecan-18-oate]) or Cys(Oxa4-cholesterol)

SEQ ID NO: 1876 - protein, 33 aa, Artificial Sequence; identical to SEQ ID NO: 1869
  OXM analog
  MOD_RES (2)..(2): Xaa=D-serine
  MOD_RES (31)..(32): Xaa=gamma glutamic acid
  MOD_RES (33)..(33): Xaa=Cys(cholest-5-en-3-yl 1-{[(2R)-3-amino-2-(amino)-3-oxopropyl]thio}-2-oxo -6,9,12,15-tetraoxa-3-azaoctadecan-18-oate]) or Cys(Oxa4-cholesterol)

SEQ ID NO: 1877 - protein, 33 aa, Artificial Sequence; identical to SEQ ID NO: 1869
  OXM analog
  MOD_RES (2)..(2): Xaa=D-serine
  MOD_RES (31)..(32): Xaa=gamma glutamic acid
  MOD_RES (33)..(33): Xaa=S-{1-[46-(cholest-5-en-3-yloxy)-3,43,46-trioxo -7,10,13,16,19,22,25,28,31,34,37,40-dodecaoxa-4,44 -diazahexatetracont-1-yl]-2,5-dioxopyrrolidin-3-yl }-L-cysteine or Cys (mal-oxa12-cholesterol)

SEQ ID NO: 1878 - protein, 33 aa, Artificial Sequence; identical to SEQ ID NO: 1869
  OXM analog
  MOD_RES (2)..(2): Xaa=Aib
  MOD_RES (31)..(32): Xaa=gamma glutamic acid
  MOD_RES (33)..(33): Xaa== Cys(cholest-5-en-3-yl 1-{[(2R)-3-amino-2-(amino)-3-oxopropyl]thio}-2-oxo -6,9,12,15-tetraoxa-3-azaoctadecan-18-oate]) or Cys(Oxa4-cholesterol)

SEQ ID NO: 1879 - protein, 33 aa, Artificial Sequence; identical to SEQ ID NO: 1869
  OXM analog
  MOD_RES (2)..(2): Xaa=1-Amino-1-cyclobutane carboxylic acid
  MOD_RES (31)..(32): Xaa=gamma glutamic acid
  MOD_RES (33)..(33): Xaa=Cys(cholest-5-en-3-yl 1-{[(2R)-3-amino-2-(amino)-3-oxopropyl]thio}-2-oxo -6,9,12,15-tetraoxa-3-azaoctadecan-18-oate]) or Cys(Oxa4-cholesterol)

SEQ ID NO: 1880 - protein, 33 aa, Artificial Sequence
  OXM analog
  MOD_RES (2)..(2): Xaa=D-serine
  MISC_FEATURE (16)..(20): Lactam bridge between side chains
  MOD_RES (31)..(32): Xaa=gamma glutamic acid
  MOD_RES (33)..(33): Xaa=S-[42-(cholest-5-en-3-yloxy)-2,42-dioxo-6,9,12 ,15,18,21,24,27,30,33,36,39-dodecaoxa-3-azadotetra cont-1-yl]-L-cysteine or Cys (oxa12-cholesterol)
HXQGTFTSDYSKYLDERRAKDFVQWLMNTKXXX

SEQ ID NO: 1881 - protein, 33 aa, Artificial Sequence; identical to SEQ ID NO: 1880
  OXM analog
  MOD_RES (2)..(2): Xaa=Aib
  MISC_FEATURE (16)..(20): Lactam bridge between side chains
  MOD_RES (31)..(32): Xaa=gamma glutamic acid
  MOD_RES (33)..(33): Xaa=S-[42-(cholest-5-en-3-yloxy)-2,42-dioxo-6,9,12 ,15,18,21,24,27,30,33,36,39-dodecaoxa-3-azadotetra cont-1-yl]-L-cysteine or Cys (oxa12-cholesterol)

SEQ ID NO: 1882 - protein, 33 aa, Artificial Sequence; identical to SEQ ID NO: 1880
  OXM analog
  MOD_RES (2)..(2): Xaa=1-Amino-1-cyclobutane carboxylic acid
  MISC_FEATURE (16)..(20): Lactam bridge between side chains
  MOD_RES (31)..(32): Xaa=gamma glutamic acid
  MOD_RES (33)..(33): Xaa=S-[42-(cholest-5-en-3-yloxy)-2,42-dioxo-6,9,12 ,15,18,21,24,27,30,33,36,39-dodecaoxa-3-azadotetra cont-1-yl]-L-cysteine or Cys (oxa12-cholesterol)

SEQ ID NO: 1883 - protein, 33 aa, Artificial Sequence; identical to SEQ ID NO: 1869
  OXM analog
  MOD_RES (2)..(2): Xaa=D-serine
  MOD_RES (31)..(32): Xaa=gamma glutamic acid
  MOD_RES (33)..(33): Xaa=S-[42-(cholest-5-en-3-yloxy)-2,42-dioxo-6,9,12 ,15,18,21,24,27,30,33,36,39-dodecaoxa-3-azadotetra cont-1-yl]-L-cysteine or Cys (oxa12-cholesterol)

SEQ ID NO: 1884 - protein, 33 aa, Artificial Sequence; identical to SEQ ID NO: 1869
  OXM analog
  MOD_RES (2)..(2): Xaa=Aib
  MOD_RES (31)..(32): Xaa=gamma glutamic acid
  MOD_RES (33)..(33): Xaa=S-[42-(cholest-5-en-3-yloxy)-2,42-dioxo-6,9,12 ,15,18,21,24,27,30,33,36,39-dodecaoxa-3-azadotetra cont-1-yl]-L-cysteine or Cys (oxa12-cholesterol)

SEQ ID NO: 1885 - protein, 33 aa, Artificial Sequence; identical to SEQ ID NO: 1869
  OXM analog
  MOD_RES (2)..(2): Xaa=1-Amino-1-cyclobutane carboxylic acid
  MOD_RES (31)..(32): Xaa=gamma glutamic acid
  MOD_RES (33)..(33): Xaa=S-[42-(cholest-5-en-3-yloxy)-2,42-dioxo-6,9,12 ,15,18,21,24,27,30,33,36,39-dodecaoxa-3-azadotetra cont-1-yl]-L-cysteine or Cys (oxa12-cholesterol)

SEQ ID NO: 1886 - protein, 33 aa, Artificial Sequence; identical to SEQ ID NO: 1869
  OXM analog
  MOD_RES (2)..(2): Xaa=D-serine
  MOD_RES (31)..(32): Xaa=gamma glutamic acid
  MOD_RES (33)..(33): Xaa=Lys(gamma-glutamic acid-palmitoyl)
  MOD_RES (33)..(33): C-terminal amidation

SEQ ID NO: 1887 - protein, 33 aa, Artificial Sequence
  OXM analog
  MOD_RES (2)..(2): Xaa=D-serine
  MOD_RES (31)..(32): Xaa=gamma glutamic acid
  MOD_RES (33)..(33): Xaa=S-[42-(cholest-5-en-3-yloxy)-2,42-dioxo-6,9,12 ,15,18,21,24,27,30,33,36,39-dodecaoxa-3-azadotetra cont-1-yl]-L-cysteine or Cys (oxa12-cholesterol)
  MOD_RES (33)..(33): C-terminal amidation
HXQGTFTSDYSKYLDERRAQDFVQWLMNTKXXX

SEQ ID NO: 1888 - protein, 32 aa, Artificial Sequence
  OXM analog
  MOD_RES (2)..(2): Xaa=D-serine
  MOD_RES (20)..(20): Xaa=Lys(gamma-glutamic acid-palmitoyl)
  MOD_RES (31)..(32): Xaa=gamma glutamic acid
  MOD_RES (32)..(32): C-terminal amidation
HXQGTFTSDYSKYLDSRRAXDFVQWLMNTKXX

SEQ ID NO: 1889 - protein, 31 aa, Artificial Sequence
  OXM analog
  MOD_RES (2)..(2): Xaa=D-serine
  MOD_RES (20)..(20): Xaa=Lys(gamma-glutamic acid-gamma-glutamic acid-palmitoyl)
  MOD_RES (31)..(31): Xaa=gamma glutamic acid
  MOD_RES (31)..(31): C-terminal amidation
HXQGTFTSDYSKYLDSRRAXDFVQWLMNTKX

SEQ ID NO: 1890 - protein, 30 aa, Artificial Sequence
  OXM analog
  MOD_RES (2)..(2): Xaa=D-serine
  MOD_RES (10)..(10): Xaa=Lys(gamma-glutamic acid-gamma-glutamic acid-palmitoyl)
  MOD_RES (30)..(30): C-terminal amidation
HXQGTFTSDXSKYLDSRRAQDFVQWLMNTK

SEQ ID NO: 1891 - protein, 30 aa, Artificial Sequence
  OXM analog
  MOD_RES (2)..(2): Xaa=D-serine
  MOD_RES (20)..(20): Xaa=Lys(gamma-glutamic acid-gamma-glutamic acid-palmitoyl)
  MOD_RES (30)..(30): C-terminal amidation
HXQGTFTSDYSKYLDERRAXDFVQWLMNTK

SEQ ID NO: 1892 - protein, 30 aa, Artificial Sequence
  OXM analog
  MOD_RES (2)..(2): Xaa=D-serine
  MOD_RES (10)..(10): Xaa=Lys(gamma-glutamic acid-gamma-glutamic acid-palmitoyl)
  MOD_RES (30)..(30): C-terminal amidation
HXQGTFTSDXSKYLDERRAQDFVQWLMNTK

SEQ ID NO: 1893 - protein, 33 aa, Artificial Sequence; identical to SEQ ID NO: 1869
  OXM analog
  MOD_RES (2)..(2): Xaa=D-serine
  MOD_RES (31)..(32): Xaa=gamma glutamic acid
  MOD_RES (33)..(33): Xaa=S-[78-(cholest-5-en-3-yloxy)-2,78-dioxo-6,9,12 ,15,18,21,24,27,30,33,36,39,42,45,48,51,54,57,60,6 3,66,69,72,75-tetracosaoxa-3-azaoctaheptacont-1-yl ]-L-cysteine or Cys (oxa24-cholesterol)

SEQ ID NO: 1894 - protein, 33 aa, Artificial Sequence
  OXM analog
  MOD_RES (2)..(2): Xaa=Aib
  MOD_RES (24)..(24): Xaa=Lys(DOTA)
  MOD_RES (27)..(27): Xaa=methionine sulfoxide
  MOD_RES (31)..(32): Xaa=gamma glutamic acid
  MOD_RES (33)..(33): Xaa=S-[42-(cholest-5-en-3-yloxy)-2,42-dioxo-6,9,12 ,15,18,21,24,27,30,33,36,39-dodecaoxa-3-azadotetra cont-1-yl]-L-cysteine or Cys (oxa12-cholesterol)
  MOD_RES (33)..(33): C-terminal amidation
HXDGTFTSDYSKYLDSRRAQDFVXWLXNTKXXX

SEQ ID NO: 1895 - protein, 31 aa, Artificial Sequence
  OXM analog
  MOD_RES (2)..(2): Xaa=D-serine
  MOD_RES (10)..(10): Xaa=Lys(gamma glutamic acid-palmitoyl)
  MOD_RES (31)..(31): Xaa=gamma glutamic acid
  MOD_RES (31)..(31): C-terminal amidation
HXQGTFTSDXSKYLDERRAQDFVQWLMNTKX

SEQ ID NO: 1896 - protein, 32 aa, Artificial Sequence
  OXM analog
  MOD_RES (2)..(2): Xaa=D-serine
  MOD_RES (10)..(10): Xaa=Lys(palmitoyl)
  MOD_RES (31)..(32): Xaa=gamma glutamic acid
  MOD_RES (32)..(32): C-terminal amidation
HXQGTFTSDXSKYLDERRAQDFVQWLMNTKXX

SEQ ID NO: 1897 - protein, 30 aa, Artificial Sequence; identical to SEQ ID NO: 1892
  OXM analog
  MOD_RES (2)..(2): Xaa=aib
  MOD_RES (10)..(10): Xaa=Lys(gamma-glutamic acid-gamma glutamic acid-palmitoyl)
  MOD_RES (30)..(30): C-terminal amidation

SEQ ID NO: 1898 - protein, 30 aa, Artificial Sequence; identical to SEQ ID NO: 1892
  OXM analog
  MOD_RES (2)..(2): Xaa=acb
  MOD_RES (10)..(10): Xaa=Lys(gamma-glutamic acid-gamma-glutamic acid-palmitoyl
  MOD_RES (30)..(30): C-terminal amidation

SEQ ID NO: 1899 - protein, 31 aa, Artificial Sequence; identical to SEQ ID NO: 1895
  OXM analog
  MOD_RES (2)..(2): Xaa=D-Serine
  MOD_RES (10)..(10): Xaa=Lys(gamma-glutamic acid-gamma-glutamic acid-palmitoyl
  MOD_RES (16)..(16): Xaa=aib
  MOD_RES (31)..(31): Xaa=gamma glutamic acid
  MOD_RES (31)..(31): C-terminal amidation

SEQ ID NO: 1900 - protein, 33 aa, Artificial Sequence; identical to SEQ ID NO: 1869
  OXM analog
  MOD_RES (2)..(2): Xaa=aib
  MOD_RES (31)..(32): Xaa=gamma glutamic acid
  MOD_RES (33)..(33): Xaa=Lys(gamma glutamic acid-palmitoyl)
  MOD_RES (33)..(33): C-terminal amidation

SEQ ID NO: 1901 - protein, 33 aa, Artificial Sequence; identical to SEQ ID NO: 1869
  OXM analog
  MOD_RES (2)..(2): Xaa=acb
  MOD_RES (31)..(32): Xaa=gamma glutamic acid
  MOD_RES (33)..(33): Xaa=Lys(gamma glutamic acid-palmitoyl)
  MOD_RES (33)..(33): C-terminal amidation

SEQ ID NO: 1902 - protein, 33 aa, Artificial Sequence; identical to SEQ ID NO: 1869
  OXM analog
  MOD_RES (2)..(2): Xaa=D-serine
  MOD_RES (31)..(32): Xaa=gamma glutamic acid
  MOD_RES (33)..(33): Xaa=S-[38-(cholest-5-en-3-yloxy)-2-oxo-6,9,12,15,1 8,21,24,27,30,33,36-undecaoxa-3-azaoctatriacont-1- yl]-L-cysteine or Cys (oxa12-O-cholesterol)

SEQ ID NO: 1903 - protein, 30 aa, Artificial Sequence
  OXM analog
  VARIANT (2)..(2): Xaa=D-serine or Aib;
  VARIANT (17)..(17): Xaa=Arg or Glu
  VARIANT (18)..(18): Xaa=Arg or Ala
  VARIANT (27)..(27): Xaa=methionine, norleucine, or O-methyl-L-homoserine
HXQGTFTSDYSKYLDSXXAQDFVQWLXNTK

SEQ ID NO: 1904 - protein, 7 aa, Artificial Sequence
  OXM peptide
RNRNNIA

SEQ ID NO: 1905 - protein, 37 aa, Artificial Sequence
  OXM analog
  VARIANT (2)..(2): Xaa=D-serine; Aib; Acb; 1-Amino-1-cyclohexane carboxylic acid (Acx); alpha-aminobutyric acid(Abu); D- alpha-aminobutyric acid (D-Abu); Aminovaleric acid Nva); beta-cyclopropyl-alanine (Cpa); propargylglycine (Prg); Allylglycine (Alg);
  VARIANT (17)..(17): Xaa=Arg or Glu
  VARIANT (18)..(18): Xaa=Arg or Ala
  VARIANT (27)..(27): Xaa=methionine (M), norleucine (Nle), methionine sulfoxide (m) or O-methyl-L-homoserine (o)
HXQGTFTSDYSKYLDSXXAQDFVQWLXNTKRNRNNIA

SEQ ID NO: 1906 - protein, 37 aa, Artificial Sequence
  OXM analog
  VARIANT (2)..(2): Xaa = D-Ser,  Aib,  Acb, Acx,  Abu, D-Abu, Aminovaleric acid (Nva), Cpa, Prg, Alg, 2-Cha, D-tbg, Vg, Acp, or Acpe
  VARIANT (12)..(12): Xaa=Ser or Lys
  VARIANT (16)..(16): Xaa=Ser or Glu
  VARIANT (17)..(17): Xaa=Arg or Glu
  VARIANT (18)..(18): Xaa=Arg or Ala
  VARIANT (20)..(20): Xaa=Gln or Lys
  VARIANT (27)..(27): Xaa=a methionine, norleucine, methionine sulfoxide, or O-methyl-L-homoserine
HXQGTFTSDYSXYLDXXXAXDFVQWLXNTKRNRNNIA

SEQ ID NO: 1907 - protein, 31 aa, Artificial Sequence
  OXM analog
  VARIANT (2)..(2): Xaa = D-Ser,  Aib,  Acb, Acx,  Abu, D-Abu, Aminovaleric acid (Nva), Cpa, Prg, Alg, 2-Cha, D-tbg, Vg, Acp, or Acpe
  VARIANT (10)..(10): Xaa=Tyr or Lys
  VARIANT (12)..(12): Xaa=Ser or Lys
  VARIANT (16)..(16): Xaa=Ser or Glu
  VARIANT (17)..(17): Xaa=Arg or Glu
  VARIANT (18)..(18): Xaa=Arg or Ala
  VARIANT (20)..(20): Xaa=Gln or Lys
  VARIANT (27)..(27): Xaa=methionine, norleucine, methionine sulfoxide, or O-methyl-L-homoserine
  VARIANT (31)..(31): Xaa=optional, but when present is one or more gamma glutamic acid residues
HXQGTFTSDXSXYLDXXXAXDFVQWLXNTKX

SEQ ID NO: 1908 - protein, 31 aa, Artificial Sequence; identical to SEQ ID NO: 1907
  OXM analog
  MOD_RES (2)..(2): Xaa = D-Ser,  Aib,  Acb, Acx,  Abu, D-Abu, Aminovaleric acid (Nva), Cpa, Prg, Alg, 2-Cha, D-tbg, Vg, Acp, or Acpe
  MOD_RES (10)..(10): Xaa=Tyr or Lys
  MOD_RES (12)..(12): Xaa=Ser or Lys
  MOD_RES (16)..(16): Xaa=Ser or Lys
  MOD_RES (17)..(17): Xaa=Arg or Glu
  MOD_RES (18)..(18): Xaa=Arg or Ala
  MOD_RES (20)..(20): Xaa=Gln or Lys
  MOD_RES (27)..(27): Xaa=methionine, norleucine, methionine sulfoxide, or O-methyl-L-homoserine
  MOD_RES (31)..(31): optional, but when present one or more gamma glutamic acid residues

SEQ ID NO: 1909 - protein, 30 aa, Artificial Sequence
  OXM analog
HSQGTFTSDSSKYLDSRRAQDFVQWLMNTK

SEQ ID NO: 1910 - protein, 32 aa, Artificial Sequence
  OXM analog
  MOD_RES (2)..(2): Xaa=D-serine, Aib, Acb, Acx, Abu, D-Abu,  Aminovaleric acid (Nva), Cpa, Prg, Alg, 2-Cha, D-tbg, Vg, Acp, or Acpe
  MOD_RES (10)..(10): Xaa=Tyr or Lys
  MOD_RES (12)..(12): Xaa=Ser or Lys
  MOD_RES (16)..(16): Xaa=Ser, aib,  or Glu
  MOD_RES (17)..(17): Xaa=Arg or Glu
  MOD_RES (18)..(18): Xaa=Arg or Ala
  MOD_RES (20)..(20): Xaa=Glu or Lys
  MOD_RES (27)..(27): Xaa=Met, norleucine, methionine sulfoxide, or O-methyl-L-homoserine
  MOD_RES (31)..(31): Xaa=gamma-glutamic acid
  MOD_RES (32)..(32): Xaa=is optional but when present, it is gamma-glutamic acid
HXQGTFTSDXSXYLDXXXAXDFVQWLXNTKXX

SEQ ID NO: 1911 - protein, 31 aa, Artificial Sequence
  OXM analog
  MOD_RES (2)..(2): Xaa=D-serine
  MOD_RES (10)..(10): Xaa=Lys(gamma-glutamic acid-gamma-glutamic acid-palmitoyl)
  MOD_RES (16)..(16): Xaa=Aib
  MOD_RES (31)..(31): Xaa=gamma-glutamic acid
  MOD_RES (31)..(31): C-terminal amidation
HXQGTFTSDXSKYLDXRRAQDFVQWLMNTEX

SEQ ID NO: 1912 - protein, 31 aa, Artificial Sequence
  OXM analog
  MOD_RES (2)..(2): Xaa=D-serine
  MOD_RES (10)..(10): Xaa=Lys(gamma-glutamic acid-gamma-glutamic acid-palmitoyl)
  MOD_RES (16)..(16): Xaa=aib
  MOD_RES (30)..(30): Xaa=D-Lys
  MOD_RES (31)..(31): Xaa=gamma-glutamic acid
  MOD_RES (31)..(31): C-terminal amidation
HXQGTFTSDXSKYLDXRRAQDFVQWLMNTXX

SEQ ID NO: 1913 - protein, 31 aa, Artificial Sequence; identical to SEQ ID NO: 1895
  OXM analog
  MOD_RES (2)..(2): Xaa=D-serine
  MOD_RES (10)..(10): Xaa=Lys(gamma-glutamic acid-gamma-glutamic acid-palmitoyl)
  MOD_RES (31)..(31): Xaa=gamma-glutamic acid
  MOD_RES (31)..(31): C-terminal amidation

SEQ ID NO: 1914 - protein, 31 aa, Artificial Sequence; identical to SEQ ID NO: 1911
  OXM analog
  MOD_RES (2)..(2): Xaa=D-serine
  MOD_RES (10)..(10): Xaa=Lys(gamma-glutamic acid-gamma-glutamic acid-palmitoyl)
  MOD_RES (16)..(16): Xaa=aib
  MOD_RES (31)..(31): Xaa=gamma-D-glutamic acid

SEQ ID NO: 1915 - protein, 31 aa, Artificial Sequence; identical to SEQ ID NO: 1895
  OXM analog
  MOD_RES (2)..(2): Xaa=D-serine
  MOD_RES (10)..(10): Xaa=Lys(glutamic acid-glutamic acid-palmitoyl)
  MOD_RES (31)..(31): Xaa=gamma-glutamic acid
  MOD_RES (31)..(31): C-terminal amidation

SEQ ID NO: 1916 - protein, 31 aa, Artificial Sequence; identical to SEQ ID NO: 1895
  OXM analog
  MOD_RES (2)..(2): Xaa=D-serine
  MOD_RES (10)..(10): Xaa=Lys(Arg-Arg-palmitoyl)
  MOD_RES (31)..(31): Xaa=gamma-glutamic acid
  MOD_RES (31)..(31): C-terminal amidation

SEQ ID NO: 1917 - protein, 31 aa, Artificial Sequence; identical to SEQ ID NO: 1895
  OXM analog
  MOD_RES (2)..(2): Xaa=D-Serine
  MOD_RES (10)..(10): Xaa=Lys(homocysteic acid-homocysteic acid-palmitoyl)
  MOD_RES (31)..(31): Xaa=gamma-glutamic acid
  MOD_RES (31)..(31): C-terminal amidation

SEQ ID NO: 1918 - protein, 31 aa, Artificial Sequence; identical to SEQ ID NO: 1895
  OXM analog
  MOD_RES (2)..(2): Xaa=D-Serine
  MOD_RES (10)..(10): Xaa=Lys(D-glutamic acid-D-glutamic acid-palmitoyl)
  MOD_RES (31)..(31): Xaa=gamma-glutamic acid
  MOD_RES (31)..(31): C-terminal amidation

SEQ ID NO: 1919 - protein, 31 aa, Artificial Sequence
  OXM analog
  MOD_RES (2)..(2): Xaa=D-Serine
  MOD_RES (10)..(10): Xaa=Lys(gamma-glutamic acid-gamma-glutamic acid-myristoyl)
  MOD_RES (16)..(16): Xaa=aib
  MOD_RES (31)..(31): Xaa=gamma-glutamic acid
  MOD_RES (31)..(31): C-terminal amidation
HXQGTFTSDXSKYLDXRRAQDFVQWLMNTKX

SEQ ID NO: 1920 - protein, 31 aa, Artificial Sequence
  OXM analog
  MOD_RES (2)..(2): Xaa=D-Serine
  MOD_RES (10)..(10): Xaa=Lys(gamma-glutamic acid-gamma-glutamic acid-palmitoyl)
  MOD_RES (16)..(16): Xaa=aib
  MOD_RES (31)..(31): Xaa=gamma-glutamic acid
  MOD_RES (31)..(31): C-terminal amidation
HXQGTFTSDXSKYLDXRAAQDFVQWLMDTKX

SEQ ID NO: 1921 - protein, 31 aa, Artificial Sequence; identical to SEQ ID NO: 1919
  OXM analog
  MOD_RES (2)..(2): Xaa=D-Serine
  MOD_RES (10)..(10): Xaa=Lys(gamma-glutamic acid-gamma-glutamic acid-stearoyl)
  MOD_RES (16)..(16): Xaa=aib
  MOD_RES (31)..(31): Xaa=gamma-glutamic acid
  MOD_RES (31)..(31): C-terminal amidation
